(19) United States
(12) Patent Application Publication
(10) Pub. No.: US 2012/0171209 A1
(43) Pub. Date: Jul. 5, 2012

(54) IMPROVED AMINO ACID SEQUENCES DIRECTED AGAINST IL-6R AND POLYPEPTIDES COMPRISING THE SAME FOR THE TREATMENT OF IL-6R RELATED DISEASES AND DISORDERS

(75) Inventors: Veerle Compernolle, Veldegem (BE); Francis Descamps, Roeselare (BE)

(73) Assignee: Ablynx N.V., Zwijnaarde (BE)

(21) Appl. No.: 13/263,223

(22) PCT Filed: Apr. 12, 2010
(86) PCT No.: PCT/EP10/54747

§ 371 Date: Mar. 22, 2012

Related U.S. Application Data
(60) Provisional application No. 61/168,379, filed on Apr. 10, 2009.

(51) Int. Cl. A61K 39/395; C12N 15/13; C12N 5/10; C12P 21/02; C12N 1/21; C07K 16/24; C12N 1/19

(52) U.S. Cl. 424/136.1; 530/387.3; 536/23.53; 435/254.2; 435/69.6; 435/252.33; 435/328

(57) ABSTRACT

The present invention relates to amino acid sequences that are directed against/and or that can specifically bind (as defined herein) Interleukin-6 Receptor (IL-6R), as well as to compounds or constructs, and in particular proteins and polypeptides, that comprise or essentially consist of one or more such amino acid sequences. In a specific aspect, the present invention provides amino acid sequences and polypeptides that are capable of binding to two or more different antigenic determinants, epitopes, parts, domains of IL-6R, also referred to as “multiparatopic” (such as e.g. “biparatopic” or “triparatopic”, etc.) amino acid sequences and polypeptides. The invention also relates to nucleic acids encoding such amino acid sequences and polypeptides, methods for preparing such amino acid sequences and polypeptides, host cells expressing or capable of expressing such amino acid sequences or polypeptides, compositions, and in particular to pharmaceutical compositions, that comprise such amino acid sequences, polypeptides, nucleic acids and/or host cells and to uses of such amino acid sequences or polypeptides, nucleic acids, host cells and/or compositions, in particular for prophylactic, therapeutic or diagnostic purposes.

### FIELD OF THE INVENTION

[0001] The present invention relates to amino acid sequences that are directed against/and or that can specifically bind (as defined herein) Interleukin-6 Receptor (IL-6R), as well as to compounds or constructs, and in particular proteins and polypeptides, that comprise or essentially consist of one or more such amino acid sequences (also referred to herein as “amino acid sequences of the invention”, “compounds of the invention”, “constructs of the invention” and “polypeptides of the invention”, respectively).

[0002] The invention also relates to nucleic acids encoding such amino acid sequences and polypeptides (also referred to herein as “nucleic acids of the invention” or “nucleotide sequences of the invention”); to methods for preparing such amino acid sequences and polypeptides; to host cells expressing or capable of expressing such amino acid sequences or polypeptides; to compositions, and in particular to pharmaceutical compositions, that comprise such amino acid sequences, polypeptides, nucleic acids and/or host cells; and to uses of such amino acid sequences or polypeptides, nucleic acids, host cells and/or compositions, in particular for prophylactic, therapeutic or diagnostic purposes, such as the prophylactic, therapeutic or diagnostic purposes mentioned herein.

[0003] Other aspects, embodiments, advantages and applications of the invention will become clear from the further description herein.

### BACKGROUND ART

[0004] The interaction of IL-6, a protein originally identified as a B cell differentiation factor (Hirano et al., 1985, Proc. Natl. Acad. Sci. USA, 82: 5490-4; EP 0257406), with IL-6R (Yamasaki et al., 1988, Science, 241: 825-8; EP 0325474) results in the formation of the IL-6/IL-6R complex. This complex binds to gp130 (Taga et al., 1989, Cell, 58: 573-81; EP 0411946), a membrane protein on a target cell, which transmits various physiological actions of IL-6. IL-6 is currently known to be involved in—amongst others—the regulation of the immune response, hematopoiesis, the acute phase response, bone metabolism, angiogenesis, and inflammation.

[0005] Interleukin-6 (IL6) is a pleiotropic cytokine involved in many physiological processes including regulation of inflammation, immune responses and hematopoiesis. IL6 exerts its biological activities through 2 membrane molecules, a ligand binding 80 kDa chain (IL6-R) and a non-ligand-binding signal transducer gp130. Formation of the IL6-IL6-R-gp130 signaling complex occurs sequentially: first IL6 binds to IL6-R (Kd: ˜10 nM). Next step is binding of this complex to gp130 via interaction sites II and III (Kd: 0.8 nM). Interaction sites II and III are composite sites comprising residues of both IL6 and 116-R. IL6 and IL6-R alone have no detectable affinity for gp130. The exact stoichiometry and composition of the IL6-IL6-R-gp130 complex is still under debate. The crystal structure of IL6-IL6-R-complex has been solved (Boulanger, 2003, Science 300: 2101-2104) and suggests a 2:2:2 stoichiometry. Besides the membrane-bound IL6-R, a soluble form (sIL6-R) can be generated by proteolytic cleavage (TACE/ADAM17) or alternative splicing. The complex of IL6 and sIL6-R can also bind to gp130. Interestingly, this also happens in cells which do not express endogenous IL-6R. Consequently, cells which release the sIL6-R protein render cells which only express gp130 responsive towards the cytokine IL6. This mechanism has been termed trans-signaling.

[0006] Deregulation of IL-6 production is implicated in the pathology of several autoimmune and chronic inflammatory proliferative disease processes (Ishihara and Hirano, 2002, Biochim. Biophys. Acta, 1592: 281-96). As a consequence, inhibitors of IL-6 induced signaling have attracted much attention in the past (Hirano et al., 1990, Immunol. Today, 11: 443-9). Polypeptides specifically binding to IL-6 (Klein et al., 1991, Blood, 78: 1198-204; EP 0312996), IL-6R (EP 0409607) or gp130 (Saito et al., 1993, J. Immunol. Methods, 163: 217-223; EP 0572118) proved to exhibit an efficient inhibitory effect on IL-6 functioning.

[0007] IL-6 overproduction and signalling (and in particular so-called trans-signalling) are involved in various diseases and disorders, such as sepsis (Starnes et al., 1999, J. Immunol., 148: 1968) and various forms of cancer such as multiple myeloma disease (MM), renal cell carcinoma (RCC), plasma cell leukaemia (Klein et al., 1991), lymphoma, B-lymphoproliferative disorder (BLPD) and prostate cancer. Non-limiting examples of other diseases caused by excessive IL-6 production or signalling include bone resorption (osteoporosis) (Roodman et al., 1992, J. Bone Miner. Res., 7: 475-8; Jilka et al., 1992, Science, 257: 88-91), cachexia (Strassman et al., 1992, J. Clin. Invest. 89: 1681-1684), psoriasis, mesangial proliferative glomerulonephritis, Kaposi's sarcoma, AIDS-related lymphoma (Emilie et al., 1994, Int. J. Immunopharmacol. 16: 391-6), inflammatory diseases and disorder such as rheumatoid arthritis, systemic onset juvenile idiopathic arthritis, hypergammaglobulinemia (Grau et al., 1990, J. Exp. Med. 172: 1505-8); Crohn's disease, ulcerative colitis, systemic lupus erythematosus (SLE), multiple sclerosis, Castleman's disease, IgM gammopathy, cardiac myxoma, asthma (in particular allergic asthma) and autoimmune insulin-dependent diabetes mellitus (Campbell et al., 1991, J. Clin. Invest. 87: 739-742). Other IL-6 related disorders will be clear to the skilled person.

[0008] As can for example be seen from the references above, the prior art describes antibodies and antibody fragments directed against human IL-6, against human IL-6R and against human gp130 protein for the prevention and treatment of IL-6 relates disorders. Examples are Tocilizumab (see Woo P, et al., 2005, Arthritis Res. Ther. 7: 1281-8; Nishimoto N et al., 2005, Blood 106: 2627-32; Ito H et al., 2004, Gastroenterology 126: 989-96; Choy E H et al., 2002, Arthritis Rheum. 46: 3143-50), BE8 (see Bataille R et al., 1995, Blood 86: 685-91; Emilie D et al., 1994, Blood 84: 2472-9; Beck J T et al., 1994, N. Engl. J. Med. 330: 602-5; Wendling D et al., 1993, J. Rheumatol. 20: 259-62), CNTO-328 of Centocor (see 2004, Journal of Clinical Oncology, 22/145: 2560; 2004, Journal of Clinical Oncology, 22/145: 2608; 2004, Int. J. Cancer 111: 592-5), C326 (anti-IL6 avirner, Avidia) and M182 (Gaillard et al., 1996, Immunology 89: 135-141). Another active principle known in the art for the prevention and treatment of IL-6 related disorders is an Fc fusion of soluble gp130 (see Becker C et al., 2004, Immunity 21: 491-501; Doganci A et al., 2005, J. Clin. Invest. 115: 313-25; Nowell M A et al., 2003, J. Immunol. 171: 3202-9; Atreya R et al., 2000, Nat, Med. 6: 583-8).

[0009] CNTO-328 and Tocilizumab are currently in clinical trials for MM, RCC, RA, soJIA, CD and SLE. Tocilizumab is available on the Japanese market since 2005 for treatment of Castleman's disease (Actemra).

### SUMMARY OF THE INVENTION

[0010] A specific, but non-limiting object of the present invention is to provide amino acid sequences, polypeptides and therapeutic compounds and compositions that have improved therapeutic and/or pharmacological properties, in addition to other advantageous properties (such as, for example, improved ease of preparation and/or reduced costs of goods), compared to the prior art amino acid sequences, antibodies and Nanobodies. These improved and advantageous properties will become clear from the further description herein. Without being limiting, the amino acid sequences, polypeptides and therapeutic compounds and compositions provided by the invention may have an improved binding and/or affinity, improved avidity, improved efficacy and/or potency, an increased selectivity and/or they may be capable of partially or preferably totally blocking the interaction of IL-6 with IL-6R and/or the interaction of gp130 with the IL-6/IL-6R complex, and/or inhibit signalization through IL-6, IL-6R, the IL-6/IL-6R complex, and/or gp130.

[0011] Generally, it is an object of the invention to provide pharmacologically active agents, as well as compositions comprising the same, that can be used in the diagnosis, prevention and/or treatment of one or more IL-6R related disorders (as defined herein); and to provide methods for the diagnosis, prevention and/or treatment of such diseases and disorders that involve the administration and/or use of such agents and compositions.

[0012] The invention provides amino acid sequences, Nanobodies and polypeptides that are directed against (as defined herein) and/or can specifically bind (as defined herein) to IL-6R; as well as compounds and constructs, and in particular proteins and polypeptides, that comprise at least one such amino acid sequence.

[0013] In a specific aspect, the present invention provides amino acid sequences and polypeptides (also referred to as “polypeptides of the invention”) that are capable of binding to two or more different antigenic determinants, epitopes, parts, domains of IL-6R. In this context, the amino acid sequences and polypeptides of the invention are also referred to as “multiparatopic” (such as e.g. “biparatopic” or “triparatopic”, etc.) amino acid sequences and polypeptides. The multiparatopic amino acid sequences and polypeptides of the invention can be directed against any antigenic determinants, epitopes, parts, and/or domains of IL-6R. The present inventors surprisingly observed that polypeptides that contained two or more amino acid sequences directed against IL-6R showed much improved properties [such as improved binding (higher avidity to IL-6R) and improved efficacy] which were many times (5 to 10 times in plasma potency assay; 40 to 100 times in TF-1 assay) higher than what would be estimated based on the duplication of said properties of the corresponding monomeric/monovalent amino acid sequence(s).

[0014] For example, and generally, a biparatopic polypeptide of the invention may comprise at least one amino acid sequence and/or Nanobody directed against a first antigenic determinant, epitope, part or domain of IL-6R and at least one amino acid sequence and/or Nanobody directed against a second antigenic determinant, epitope, part or domain of IL-6R different from the first antigenic determinant, epitope, part or domain (in which said amino acid sequences and/or Nanobody may be suitably linked, for example via a suitable linker as further described herein). Preferably, such a biparatopic polypeptide of the invention is further such that, when it binds to IL-6R, it is capable of simultaneously binding to the first antigenic determinant, epitope, part or domain (i.e. via the at least one amino acid sequence and/or Nanobody of the invention capable of binding to said first antigenic determinant, epitope, part or domain) and binding to said second antigenic determinant, epitope, part or domain (i.e. via the at least one amino acid sequence and/or Nanobody of the invention capable of binding to said second antigenic determinant, epitope, part or domain). Examples of such biparatopic polypeptides of the invention will become clear from the further description herein. Also, a triparatopic polypeptide of the invention may comprise at least one further amino acid sequence and/or Nanobody of the invention directed against a third antigenic determinant, epitope, part or domain of IL-6R (different from both the first and second antigenic determinant, epitope, part or domain), and generally multiparatopic polypeptides of the invention may contain at least two amino acid sequences and/or Nanobodies of the invention directed against at least two different antigenic determinants, epitopes, parts or domains of IL-6R. Generally, such biparatopic, triparatopic and multiparatopic polypeptides of the invention may be as further described herein, and the various preferred aspects of the invention as described herein also apply to these biparatopic, triparatopic and multiparatopic polypeptides of the invention (for example, these biparatopic, triparatopic and multiparatopic polypeptides of the invention preferably comprise single variable domains and more preferably Nanobodies).

[0015] Preferably, the epitopes bound by the amino acid sequences and/or Nanobodies comprised in the biparatopic (or multiparatopic) polypeptides of the invention are extracellular epitopes. Some specific epitopes to which the amino acid sequences and/or Nanobodies and polypeptides of the invention may preferably bind will become clear from the further description herein.

[0016] Such biparatopic (or multiparatopic) polypeptides of the invention are preferably at least capable, upon binding to IL-6R, (i) to modulate, and in particular inhibit and/or prevent, binding of IL-6R to IL-6 and/or binding of the IL-6/IL-6R complex to gp130 and thus (ii) to modulate, and in particular inhibit or prevent, the signalling that is mediated by IL-6, IL-6R, IL-6/IL-6R complex and/or gp130, (iii) to modulate the biological pathways in which IL-6, IL-6R, the IL6/IL-6R complex and/or gp130 are involved, and/or (iv) to modulate the biological mechanisms, responses and effects associated with such signalling or these pathways.

[0017] Such biparatopic (or multiparatopic) polypeptides of the invention preferably comprise at least one amino acid sequence and/or Nanobody that is capable, upon binding to IL-6R, (i) to modulate, and in particular inhibit and/or prevent, binding of IL-6R to IL-6 and/or binding of the IL-6/IL-6R complex to gp130 and thus (ii) to modulate, and in particular inhibit or prevent, the signalling that is mediated by IL-6, IL-6R, IL-6/IL-6R complex and/or gp130, (iii) to modulate the biological pathways in which IL-6, IL-6R, the IL6/IL-6R complex and/or gp130 are involved, and/or (iv) to modulate the biological mechanisms, responses and effects associated with such signalling or these pathways; as well as at least one further amino acid sequence and/or Nanobody that is capable of binding to at least one other antigenic determinant, epitope, part or domain on IL-6R (i.e. different from the antigenic determinant, epitope, part or domain to which the aforementioned amino acid sequence and/or Nanobody can bind).

[0018] For example, without being limiting, the biparatopic (or multiparatopic) polypeptides of the invention may be directed against an epitope that lies in, forms part of, or overlaps with (i.e. in the primary or tertiary structure) or is in close proximity to (i.e. in the primary or tertiary structure) the IL-6 binding site on IL-6R (for example, competitively with IL-6) and/or are capable of competing with ft-6 for binding to IL-6R, as well as against at least one other antigenic determinant, epitope, part or domain on IL-6R. Generally, such a biparatopic (or multiparatopic) polypeptides of the invention will contain at least one amino acid sequence and/or Nanobody that is capable of binding an epitope that lies in, forms part of, or overlaps with (i.e. in the primary or tertiary structure) or is in dose proximity to (i.e. in the primary or tertiary structure) the IL-6 binding site on IL-6R (for example, competitively with IL-6), and/or that is capable of competing with IL-6 for binding to IL-6R, as well as at least one further amino acid sequence and/or Nanobody that is capable of binding to at least one other antigenic determinant, epitope, part or domain on IL-6R.

[0019] In a preferred, but non-limiting aspect, the biparatopic (or multiparatopic) polypeptides of the invention are directed against one or more of the 18 contact residues as described in Boulanger et al. (2003, Science 300: 2101-2104) present in the extracellular D3 domain of the IL-6R, more preferably amino acid residues Phe229 and Phe279 present in the extracellular D3 domain of the IL-6R).

[0020] In another preferred, but non-limiting aspect, the biparatopic (or multiparatopic) polypeptides of the invention are directed against an epitope that lies in, forms part of, or overlaps with (i.e. in the primary or tertiary structure) or is in close proximity to (i.e. in the primary or tertiary structure) the gp130 binding site on IL-6R and/or the IL-6/IL-6R complex (for example, competitively with gp130); and/or are capable of competing with gp130 for binding to the IL-6/IL-6R complex, as well as against at least one other antigenic determinant, epitope, part or domain on IL-6R. Generally, such a biparatopic (or multiparatopic) polypeptides of the invention will contain at least one amino acid sequence and/or Nanobody that is capable of binding an epitope that lies in, forms part of, or overlaps with (i.e. in the primary or tertiary structure) or is in close proximity to (i.e. in the primary or tertiary structure) the gp130 binding site on IL-6R and/or the IL-6/IL-6R complex (for example, competitively with gp130), and/or that is capable of competing with gp130 for binding to the IL-6/IL-6R complex, as well as at least one further amino acid sequence and/or Nanobody that is capable of binding to at least one other antigenic determinant, epitope, part or domain on IL-6R.

[0021] In a preferred, but non-limiting aspect, the biparatopic (or multiparatopic) polypeptides of the invention are directed against an epitope that lies in, forms part of, or overlaps with (i.e. in the primary or tertiary structure) or is in close proximity to (i.e. in the primary or tertiary structure) the BN-12 binding site on IL-6R (for example, competitively with BN-12) and/or are capable of competing with BN-12 for binding to IL-6R, as well as against at least one other antigenic determinant, epitope, part or domain on IL-6R. Generally, such a biparatopic (or multiparatopic) polypeptides of the invention will contain at least one amino acid sequence and/or Nanobody that is capable of binding an epitope that lies in, forms part of, or overlaps with (i.e. in the primary or tertiary structure) or is in close proximity to (i.e. in the primary or tertiary structure) the BN-12 binding site on IL-6R (for example, competitively with BN-12), and/or that is capable of competing with BN-12 for binding to IL-6R, as well as at least one further amino acid sequence and/or Nanobody that is capable of binding to at least one other antigenic determinant, epitope, part or domain on IL-6R.

[0022] The at least one further amino acid sequence and/or Nanobody that is capable of binding to at least one other antigenic determinant, epitope, part or domain on IL-6R may be any amino acid sequence and/or Nanobody that is directed against and/or capable of binding IL-6R.

[0023] In a preferred but non-limiting aspect, the at least one further amino acid sequence and/or Nanobody that is capable of binding to at least one other antigenic determinant, epitope, part or domain on IL-6R binds an epitope present in the extracellular D1 domain; and/or said at least one further amino acid sequence and/or Nanobody will recognize and/or specifically bind IL-6R while not binding the hybrid IL-6R (as described in Example 3; SEQ ID NO: 131). Accordingly, in a preferred but non-limiting aspect, the biparatopic (or multiparatopic) polypeptides of the invention may also be directed against an epitope that lies in, forms part of, or overlaps with (i.e. in the primary or tertiary structure) or is in close proximity to (i.e. in the primary or tertiary structure) the D1 domain of IL-6R and/or may be capable of specifically binding IL-6R while not binding the hybrid IL-6R (as described in Example 3; SEQ ID NO: 131).

[0024] In another preferred but non-limiting aspect, the at least one further amino acid sequence and/or Nanobody that is capable of binding to at least one other antigenic determinant, epitope, part or domain on IL-6R binds an epitope present in the extracellular D2 domain; and/or said at least one further amino acid sequence and/or Nanobody will recognize and/or specifically bind IL-6R as well as the hybrid IL-6R (as described in Example 3; SEQ ID NO: 131). Accordingly, in a preferred but non-limiting aspect, the biparatopic (or multiparatopic) polypeptides of the invention may also be directed against an epitope that lies in, forms part of, or overlaps with (i.e. in the primary or tertiary structure) or is in close proximity to (i.e. in the primary or tertiary structure) the D2 domain of IL-6R and/or may be capable of specifically binding IL-6R as well as the hybrid IL-6R (as described in Example 3; SEQ ID NO: 131).

[0025] In another preferred but non-limiting aspect, the at least one further amino acid sequence and/or Nanobody that is capable of binding to at least one other antigenic determinant, epitope, part or domain on IL-6R binds an epitope present in the extracellular D3 domain; and/or said at least one further amino acid sequence and/or Nanobody will recognize and/or specifically bind IL-6R as well as the hybrid IL-6R (as described in Example 3; SEQ ID NO: 131). Accordingly, in a preferred but non-limiting aspect, the biparatopic (or multiparatopic) polypeptides of the invention may also be directed against an epitope that lies in, forms part of, or overlaps with (i.e. in the primary or tertiary structure) or is in close proximity to (i.e. in the primary or tertiary structure) the D3 domain of IL-6R and/or may be capable of specifically binding IL-6R as well as the hybrid IL-6R (as described in Example 3; SEQ ID NO: 131).

[0026] The at least one further amino acid sequence and/or Nanobody that is capable of binding to at least one other antigenic determinant, epitope, part or domain on IL-6R may bind an epitope that lies in, forms part of, or overlaps with (i.e. in the primary or tertiary structure) or is in close proximity to (i.e. in the primary or tertiary structure) the IL-6 binding site on IL-6R (for example, competitively with IL-6) and/or may be capable of competing with IL-6 for binding to IL-6R; the at least one further amino acid sequence and/or Nanobody that is capable of binding to at least one other antigenic determinant, epitope, part or domain on IL-6R may bind one or more of the 18 contact residues as described in Boulanger et al. 2003 (Science 300: 2101-2104) present in the extracellular D3 domain of the IL-6R, more preferably amino acid residues Phe229 and Phe279 present in the extracellular D3 domain of the IL-6R; the at least one further amino acid sequence and/or Nanobody that is capable of binding to at least one other antigenic determinant, epitope, part or domain on IL-6R may bind an epitope that lies in, forms part of, or overlaps with (i.e. in the primary or tertiary structure) or is in close proximity to (i.e. in the primary or tertiary structure) the binding site of the reference IgG and/or the reference Fab on IL-6R (for example, competitively with the reference IgG and/or the reference Fab) and/or may be capable of competing with the reference IgG and/or the reference Fab for binding to IL-6R; and/or the at least one further amino acid sequence and/or Nanobody that is capable of binding to at least one other antigenic determinant, epitope, part or domain on IL-6R may bind an epitope that lies in, forms part of, or overlaps with (i.e. in the primary or tertiary structure) or is in close proximity to (i.e. in the primary or tertiary structure) the Tocilizumab (MRA) binding site on IL-6R (for example, competitively with Tocilizumab (MRA)) and/or my be capable of competing with Tocilizumab (MRA) for binding to IL-6R.

[0027] In another aspect, the at least one further amino acid sequence and/or Nanobody that is capable of binding to at least one other antigenic determinant, epitope, part or domain on IL-6R may bind an epitope that lies in, forms part of, or overlaps with (i.e. in the primary or tertiary structure) or is in close proximity to (i.e. in the primary or tertiary structure) the gp130 binding site on IL-6R and/or the IL-6/IL-6R complex (for example, competitively with gp130) and/or may be capable of competing with gp130 for binding to the IL-6/IL-6R complex; and/or the at least one further amino acid sequence and/or Nanobody that is capable of binding to at least one other antigenic determinant, epitope, part or domain on IL-6R may bind an epitope that lies in, forms part of, or overlaps with (i.e. in the primary or tertiary structure) or is in close proximity to (i.e. in the primary or tertiary structure) the M182 binding site on IL-6R (for example, competitively with M182) and/or may be capable of competing with M182 for binding to IL-6R.

[0028] In another aspect, the at least one further amino acid sequence and/or Nanobody that is capable of binding to at least one other antigenic determinant, epitope, part or domain on IL-6R may bind an epitope that lies in, forms part of, or overlaps with (i.e. in the primary or tertiary structure) or is in close proximity to (i.e. in the primary or tertiary structure) the BN-12 binding site on IL-6R (for example, competitively with BN-12) and/or may be capable of competing with BN-12 for binding to IL-6R.

[0029] As such, the biparatopic (or multiparatopic) polypeptides of the invention may at least be capable, upon binding to IL-6R,
[0030] (i) to inhibit or affect (e.g. fully or partially disrupt) the formation of the IL-6/IL-6R complex in such a way that the binding of IL-6 to—e.g. its affinity for—IL-6R is reduced (or reversely, that the binding of IL-6R to—e.g. its affinity for—IL-6 is reduced), so that the signalling, pathway(s) and/or mechanism(s) induced/mediated by the binding of IL-6 to IL-6R is modulated (e.g. reduced) compared to the signalling, pathway(s) and/or mechanism(s) induced/mediated by the binding of IL-6 to IL-6R without the presence of the amino acid sequence and/or polypeptide of the invention; and
[0031] (ii) to inhibit or affect (e.g. fully or partially disrupt) the formation of the IL-6/IL-6R complex is in such a way that the binding of the complex to—e.g. its affinity for—gp130 is reduced (or reversely, that the binding of gp 130 to—e.g. its affinity for—the complex is reduced), so that the signalling, pathway(s) and/or mechanism(s) induced/mediated by the binding of the complex to gp130 is modulated (e.g. reduced) compared to the signalling, pathway(s) and/or mechanism(s) induced/mediated by the binding of the complex to gp130 without the presence of the amino acid sequence or Nanobody of the invention.

[0032] The biparatopic (or multiparatopic) polypeptides of the invention may at least be capable, upon binding to IL-6R,
[0033] (i) to inhibit or affected (e.g. fully or partially disrupt) the formation of the IL-6/IL-6R complex in such a way that the binding of IL-6 to—e.g. its affinity for—IL-6R is reduced (or reversely, that the binding of IL-6R to—e.g. its affinity for—IL-6 is reduced), so that the signalling, pathway(s) and/or mechanism(s) induced/mediated by the binding of IL-6 to IL-6R is modulated (e.g. reduced) compared to the signalling, pathway(s) and/or mechanism(s) induced/mediated by the binding of IL-6 to IL-6R without the presence of the amino acid sequence and/or polypeptide of the invention; and
[0034] (ii) to modulate (e.g. inhibit) the binding of the IL-6/IL-6R complex to gp130, so that the signalling, pathway(s) and/or mechanism(s) induced/mediated by the binding of the IL-6/IL-6R complex to gp130 is modulated (e.g. reduced) compared to the signalling, pathway(s) and/or mechanism(s) induced/mediated by the binding of the IL-6/IL-6R complex to gp130 without the presence of the amino acid sequence and/or polypeptide of the invention.

[0035] The biparatopic (or multiparatopic) polypeptides of the invention may at least be capable, upon binding to IL-6R,
[0036] (i) to inhibit or affect (e.g. fully or partially disrupt) the formation of the IL-6/IL-6R complex is in such a way that the binding of the complex to—e.g. its affinity for—gp130 is reduced (or reversely, that the binding of gp 130 to—e.g. its affinity for—the complex is reduced), so that the signalling, pathway(s) and/or mechanism(s) induced/mediated by the binding of the complex to gp130 is modulated (e.g. reduced) compared to the signalling, pathway(s) and/or mechanism(s) induced/mediated by the binding of the complex to gp130 without the presence of the amino acid sequence or Nanobody of the invention; and
[0037] (ii) to modulate (e.g. inhibit) the binding of the IL-6/IL-6R complex to gp130, so that the signalling, pathway(s) and/or mechanism(s) induced/mediated by the binding of the IL-6/IL-6R complex to gp130 is modulated (e.g. reduced) compared to the signalling, pathway(s) and/or mechanism(s) induced/mediated by the binding of the IL-6/IL-6R complex to gp130 without the presence of the amino acid sequence and/or polypeptide of the invention.

[0038] The biparatopic (or multiparatopic) polypeptides of the invention may at least be capable, upon binding to IL-6R,
[0039] (i) to inhibit or affected (e.g. fully or partially disrupt) the formation of the IL-6/IL-6R complex in such a way that the binding of IL-6 to—e.g. its affinity for—IL-6R is reduced (or reversely, that the binding of IL-6R to—e.g. its affinity for—IL-6 is reduced), so that the signalling, pathway(s) and/or mechanism(s) induced/mediated by the binding of IL-6 to IL-6R is modulated (e.g. reduced) compared to the signalling, pathway(s) and/or mechanism(s) induced/mediated by the binding of IL-6 to IL-6R without the presence of the amino acid sequence and/or polypeptide of the invention;
[0040] (ii) to inhibit or affect (e.g. fully or partially disrupt) the formation of the IL-6/IL-6R complex is in such a way that the binding of the complex to—e.g. its affinity for—gp130 is reduced (or reversely, that the binding of gp 130 to—e.g. its affinity for—the complex is reduced), so that the signalling, pathway(s) and/or mechanism(s) induced/mediated by the binding of the complex to gp130 is modulated (e.g. reduced) compared to the signalling, pathway(s) and/or mechanism(s) induced/mediated by the binding of the complex to gp130 without the presence of the amino acid sequence or Nanobody of the invention; and
[0041] (iii) to modulate (e.g. inhibit) the binding of the IL-6/IL-6R complex to gp130, so that the signalling, pathway(s) and/or mechanism(s) induced/mediated by the binding of the IL-6/IL-6R complex to gp130 is modulated (e.g. reduced) compared to the signalling, pathway(s) and/or mechanism(s) induced/mediated by the binding of the IL-6/IL-6R complex to gp130 without the presence of the amino acid sequence and/or polypeptide of the invention.

[0042] The biparatopic (or multiparatopic) polypeptide of the invention or the composition comprising the same should at least “modulate” or effect a change (i.e. an activity, preferably as an antagonist) with respect to at least one the pathway(s) or mechanism(s) in which IL-6, IL-6R, the IL-6/IL-6R complex and/or gp130 (or its pathway(s)) are involved (such as its signalling pathway or metabolic pathway and their associated biological or physiological effects). In one aspect, the biparatopic (or multiparatopic) polypeptide of the invention or the composition comprising the same may “modulate” or effect a change with respect to more than one (such as two, three, four or even more) biological or physiological pathways or mechanisms (i.e. the biparatopic (or multiparatopic) polypeptide of the invention or the composition comprising the same may have more than one mode of action). The different modes of action may be mediated each by one of the binding units (as further defined herein) of the biparatopic (or multiparatopic) polypeptide of the invention, wherein each binding unit binds at a different binding site of IL-6R.

[0043] In a preferred aspect, the biparatopic (or multiparatopic) polypeptide of the invention may modulate the signalling, pathway(s) and/or mechanism(s) induced/mediated by the binding of IL-6 to IL-6R and at the same time modulate the signalling, pathway(s) and/or mechanism(s) induced/mediated by the binding of the IL-6/IL-6R complex to gp130. In another preferred aspect, the biparatopic polypeptide of the invention may combine the modes of action of Tocilizumab (MRA) and M182, and/or the modes of action of the reference IgG and/or reference Fab and M182.

[0044] Accordingly, the present invention also relates to a biparatopic (or multiparatopic) polypeptide or a composition comprising the same that combines two different modes of action each mediated by one of the binding units of the biparatopic polypeptide of the invention, wherein each binding unit binds at a different binding site of IL-6R.

[0045] The amino acid sequences and/or Nanobodies that form (i.e. are comprised in, are encompassed in, are used to generate and/or make up) the biparatopic (or multiparatopic) polypeptides of the invention can be any amino acid sequence and/or Nanobody that is capable of binding to at least one antigenic determinant, epitope, part or domain on IL-6R as long as the resulting biparatopic (or multiparatopic) polypeptides of the invention exhibits the desired effects such as modulating and/or effecting a change (i.e. an activity, preferably as an antagonist) with respect to at least one the pathway(s) or mechanism(s) in which IL-6, IL-6R, the IL-6/IL-6R complex and/or gp130 (or its pathway(s)) are involved (such as its signalling pathway or metabolic pathway and their associated biological or physiological effects). Accordingly, the biparatopic (or multiparatopic) polypeptides of the invention preferably comprise at least one amino acid sequence and/or Nanobody that is capable of binding to at least one antigenic determinant, epitope, part or domain on IL-6R and, in addition, that is inducing to the biparatopic (or multiparatopic) polypeptide of the invention the capacity to exhibit the desired effects (as described herein). Preferred amino acid sequences and/or Nanobodies are e.g. described in WO 08/020,079 and/or are described herein (referred to herein as “amino acid sequence of the invention” and “Nanobody of the invention”).

[0046] In a specific aspect, the amino acid sequences and/or Nanobodies that form (i.e. are comprised in, are encompassed in, are used to generate and/or make up) the biparatopic (or multiparatopic) polypeptides of the invention may bind to IL-6R with an affinity (suitably measured and/or expressed as a K_{D}-value (actual or apparent), a K_{A}-value (actual or apparent), a kₒₙ-rate and/or a k_{off}-rate, or alternatively as an IC₅₀ value, as further described herein) that is as defined herein.

[0047] In particular, the amino acid sequences and/or Nanobodies that form (i.e. are comprised in, are encompassed in, are used to generate and/or make up) the biparatopic (or multiparatopic) polypeptides of the invention are preferably such that they:
[0048] bind to IL-6R with a dissociation constant (K_{D}) of 10⁻⁵ to 10⁻¹² moles/liter or less, and preferably 10⁻⁷ to 10⁻¹² moles/liter or less and more preferably 10⁻⁸ to 10⁻¹² moles/liter (i.e. with an association constant (K_{A}) of 10⁵ to 10¹² liter/ moles or more, and preferably 10⁷ to 10¹² liter/moles or more and more preferably 10⁸ to 10¹² liter/moles);
   and/or such that they:
[0049] bind to IL-6R with a kₒₙ-rate of between 10² M⁻¹s⁻¹ to about 10⁷ M⁻¹s⁻¹, preferably between 10³ M⁻¹s⁻¹ and 10⁷ M⁻¹s⁻¹, more preferably between 10⁴ M⁻¹s⁻¹ and 10⁷ M⁻¹s⁻¹, such as between 10⁵ M⁻¹s⁻¹ and 10⁷ M⁻¹s⁻¹;
   and/or such that they:
[0050] bind to IL-6R with a k_{off} rate between 1 s⁻¹ (t_{1/2}=0.69 s) and 10⁻⁶ s⁻¹ (providing a near irreversible complex with a t_{1/2} of multiple days), preferably between 10⁻² s⁻¹ and 10⁻⁶ s⁻¹, more preferably between 10⁻³ s⁻¹ and 10⁻⁶ s⁻¹, such as between 10⁻⁴ s⁻¹ and 10⁻⁶ s⁻¹.

[0051] Preferably, a monovalent amino acid sequence of the invention (or a polypeptide that contains only one amino acid sequence of the invention) is preferably such that it will bind to IL-6R with an affinity less than 500 nM, preferably less than 200 nM, more preferably less than 10 nM, such as less than 500 μM.

[0052] Some preferred IC50 values for binding of the amino acid sequences, Nanobodies and/or polypeptides of the invention to IL-6R will become clear from the further description and examples herein.

[0053] In its broadest sense, the amino acid sequences and/or Nanobodies that form (i.e. are comprised in, are encompassed in, are used to generate and/or make up) the biparatopic (or multiparatopic) polypeptides of the invention are not particularly limited to binding or defined by a specific antigenic determinant, epitope, part or domain of IL-6R against which they are directed. In one aspect of the invention, these amino acid sequences and/or Nanobodies are preferably directed against any epitope of the IL-6 receptor involved in the interaction of the IL-6 receptor with IL-6.

[0054] Such epitopes or interaction sites have been described in detail in Boulanger et al. (2003, Science 300: 2101-2104) and reference is specifically made to FIG. 2 in cited reference. More preferably, these amino acid sequences and/or Nanobodies may be directed against an extracellular domain of the IL-6 receptor, such as the D1 domain, the D2 domain and/or the D3 domain. Still more preferably, these amino acid sequences and/or Nanobodies may be directed against the extracellular D3 domain of the IL-6 receptor. Still more preferably, these amino acid sequences and/or Nanobodies may interact with one or more of the 18 contact residues as described in Boulanger et al. (2003,Science 300: 2101-2104) present in the extracellular D3 domain of the IL-6 receptor that contribute to the interaction of the IL-6 receptor with IL-6. Most preferably, these amino acid sequences and/or Nanobodies interact with amino acid residues Phe229 and Phe279 present in the extracellular D3 domain of the IL-6 receptor.

[0055] Thus, in one preferred, but non-limiting aspect, the amino acid sequences and/or Nanobodies that form (i.e. are comprised in, are encompassed in, are used to generate and/or make up) the biparatopic (or multiparatopic) polypeptides of the invention are directed against an epitope of the IL-6 receptor involved in the interaction of the IL-6 receptor with IL-6, and are as further defined herein.

[0056] Alternatively the amino acid sequences and/or Nanobodies that form (i.e. are comprised in, are encompassed in, are used to generate and/or make up) the biparatopic (or multiparatopic) polypeptides of the invention are directed against any epitope of the IL-6 receptor involved in the interaction of the IL-6 receptor and/or the IL-6/IL-6R complex with gp130. Such epitopes or interaction sites have been described in detail in Boulanger et al. (2003, Science 300: 2101-2104) and reference is specifically made to FIG. 2 in cited reference.

[0057] In this context, according to a non-limiting aspect, these amino acid sequences and/or Nanobodies are preferably such that they can compete for binding to the IL-6 receptor with the commercially available human-mouse reconstituted chimeric monoclonal anti-IL6R antibody Tocilizumab (MRA) (Chugai/Roche) or an antigen binding fragment thereof (see for example WO 92/19759 and corresponding European patent EP 0628639, as well as Shinkura et al., 1998, Anticancer Research 18: 1217-1222), for example in the assay described in Example 11; and/or such that they can bind to the same epitope or binding site on IL-6R as Tocilizumab (MRA), or to an epitope close to said binding site and/or overlapping with said binding site.

[0058] Also, according to a non-limiting aspect, these amino acid sequences and/or Nanobodies are preferably such that they can compete for binding to the IL-6 receptor with the reference IgG and/or reference Fab according to EP 0628639; and/or such that they can bind to the same epitope or binding site on IL-6R as said reference IgG or reference Fab, or to an epitope close to said binding site and/or overlapping with said binding site. For the preparation and sequence of said reference IgG and reference Fab, reference is made to Example 1 below, as well as to SEQ ID NO's: 126 to 129.

[0059] Thus, generally and without limitation, the amino acid sequences and/or Nanobodies that form (i.e. are comprised in, are encompassed in, are used to generate and/or make up) the biparatopic (or multiparatopic) polypeptides of the invention may be directed against any epitope of the IL-6 receptor involved in the interaction of the IL-6 receptor with IL-6 and/or the interaction of IL-6R and/or the IL-6/IL-6R complex with gp130.

[0060] In one specific, but non-limiting aspect, the amino acid sequence that forms (i.e. is comprised in, is encompassed in, is used to generate and/or make up) the biparatopic (or multiparatopic) polypeptides of the invention may be an amino acid sequence that comprises an immunoglobulin fold or may be an amino acid sequence that, under suitable conditions (such as physiological conditions) is capable of forming an immunoglobulin fold (i.e. by folding). Reference is inter alia made to the review by Halaby et al. (1999, J. Protein Eng. 12: 563-71). Preferably, when properly folded so as to form an immunoglobulin fold, such an amino acid sequence is capable of specific binding (as defined herein) to IL-6R; and more preferably capable of binding to IL-6R with an affinity (suitably measured and/or expressed as a Kₐ-value (actual or apparent), a K_{A}-value (actual or apparent), a kₒₙ-rate and/or a k_{off}-rate, or alternatively as an IC₅₀ value, as further described herein) that is as defined herein. Also, parts, fragments, analogs, mutants, variants, alleles and/or derivatives of such amino acid sequences are preferably such that they comprise an immunoglobulin fold or are capable for forming, under suitable conditions, an immunoglobulin fold.

[0061] In particular, but without limitation, the amino acid sequence may be amino acid sequence that essentially consists of 4 framework regions (FR1 to FR4 respectively) and 3 complementarity determining regions (CDR1 to CDR3 respectively); or any suitable fragment of such an amino acid sequence (which will then usually contain at least some of the amino acid residues that form at least one of the CDR's, as further described herein).

[0062] The amino acid sequence may in particular be an immunoglobulin sequence or a suitable fragment thereof, and more in particular be an immunoglobulin variable domain sequence or a suitable fragment thereof, such as light chain variable domain sequence (e.g. a V_{L}-sequence) or a suitable fragment thereof; or a heavy chain variable domain sequence (e.g. a V_{H}-sequence) or a suitable fragment thereof. When the amino acid sequence is a heavy chain variable domain sequence, it may be a heavy chain variable domain sequence that is derived from a conventional four-chain antibody (such as, without limitation, a V_{H} sequence that is derived from a human antibody) or be a so-called V_{HH}-sequence (as defined herein) that is derived from a so-called “heavy chain antibody” (as defined herein).

[0063] The amino acid sequence that forms (i.e. is comprised in, is encompassed in, is used to generate and/or make up) the biparatopic (or multiparatopic) polypeptides of the invention may in particular be a domain antibody (or an amino acid sequence that is suitable for use as a domain antibody), a single domain antibody (or an amino acid sequence that is suitable for use as a single domain antibody), a “dAb” (or an amino acid sequence that is suitable for use as a dAb) or a Nanobody™ (as defined herein, and including but not limited to a V_{HH} sequence); other single variable domains, or any suitable fragment of any one thereof. For a general description of (single) domain antibodies, reference is also made to the prior art cited above, as well as to EP 0368684. For the term “dAb's”, reference is for example made to Ward et al. (1989, Nature 341 (6242): 544-6), to Holt et al. (2003, Trends Biotechnol., 21(11): 484-490); as well as to for example WO 06/030220, WO 06/003388 and other published patent applications of Domantis Ltd. It should also be noted that, although less preferred in the context of the present invention because they are not of mammalian origin, single domain antibodies or single variable domains can be derived from certain species of shark (for example, the so-called “IgNAR domains”, see for example WO 05/18629).

[0064] In particular, the amino acid sequence of the invention may be a Nanobody® (as defined herein) or a suitable fragment thereof. [Note: Nanobody®, Nanobodies® and Nanoclone® are registered trademarks of Ablynx N.V.]

[0065] In a non-limiting aspect of the invention, the amino acid sequences and/or Nanobodies that form (i.e. are comprised in, are encompassed in, are used to generate and/or make up) the biparatopic (or multiparatopic) polypeptides of the invention, comprise CDR sequences that are generally as further defined herein (these amino acid sequences and/or Nanobodies are also encompassed in the present invention and are also referred to as “amino acid sequences of the invention” and “Nanobodies of the invention”).

[0066] Thus, the invention also relates to such amino acid sequences and/or Nanobodies that can bind to (as defined herein) and/or are directed against IL-6R and that comprise CDR sequences that are generally as further defined herein, to suitable fragments thereof, as well as to polypeptides that comprise or essentially consist of one or more of such Nanobodies and/or suitable fragments. In a preferred aspect, the invention relates to Nanobodies with SEQ ID NO's: 132 to 216 (see Tables A-1 and A-3).

[0067] In particular, the invention in some specific aspects provides:
[0068] amino acid sequences that are directed against (as defined herein) IL-6R and that have at least 80%, preferably at least 85%, such as 90% or 95% or more sequence identity with at least one of the amino acid sequences of SEQ ID NO's: 132-216 (see Table A-3);
[0069] amino acid sequences that cross-block (as defined herein) the binding of at least one of the amino acid sequences of SEQ ID NO's: 132-216 (see Table A-3) to IL-6R and/or that compete with at least one of the amino acid sequences of SEQ ID NO's: 132-216 (see Table A-3) for binding to IL-6R;
   which amino acid sequences may be as further described herein (and may for example be Nanobodies); as well as polypeptides of the invention that comprise one or more of such amino acid sequences (which may be as further described herein), and particularly biparatopic (or multiparatopic) polypeptides as described herein, and nucleic acid sequences that encode such amino acid sequences and polypeptides. Such amino acid sequences and polypeptides do not include any naturally occurring ligands.

[0070] For binding to IL-6R, an amino acid sequence or Nanobody of the invention will usually contain within its amino acid sequence one or more amino acid residues or one or more stretches of amino acid residues (i.e. with each “stretch” comprising two or amino acid residues that are adjacent to each other or in close proximity to each other, i.e. in the primary or tertiary structure of the amino acid sequence) via which the amino acid sequence or Nanobody of the invention can bind to IL-6R, which amino acid residues or stretches of amino acid residues thus form the “site” for binding to IL-6R (also referred to herein as the “antigen binding site”).

[0071] Thus, in one specific, but non-limiting aspect, the invention relates to an amino acid sequence directed against IL-6R, that comprises one or more stretches of amino acid residues chosen from the group consisting of:
[0072] a) the amino acid sequences of SEQ ID NO's: 302-386;
[0073] b) amino acid sequences that have at least 80% amino acid identity with at least one of the amino acid sequences of SEQ ID NO's: 302-386;
[0074] c) amino acid sequences that have 3, 2, or 1 amino acid difference with at least one of the amino acid sequences of SEQ ID NO's: 302-386;
[0075] d) the amino acid sequences of SEQ ID NO's: 472-556;
[0076] e) amino acid sequences that have at least 80% amino acid identity with at least one of the amino acid sequences of SEQ ID NO's: 472-556;
[0077] f) amino acid sequences that have 3, 2, or 1 amino acid difference with at least one of the amino acid sequences of SEQ ID NO's: 472-556;
[0078] g) the amino acid sequences of SEQ ID NO's: 642-726;
[0079] h) amino acid sequences that have at least 80% amino acid identity with at least one of the amino acid sequences of SEQ ID NO's: 642-726;
[0080] i) amino acid sequences that have 3, 2, or 1 amino acid difference with at least one of the amino acid sequences of SEQ ID NO's: 642-726;
   or any suitable combination thereof.

[0081] In this specific aspect, the amino acid sequence preferably comprises one or more stretches of amino acid residues chosen from the group consisting of:
[0082] i) the amino acid sequences of SEQ ID NO's: 302-386;
[0083] ii) the amino acid sequences of SEQ ID NO's: 472-556; and
[0084] iii) the amino acid sequences of SEQ ID NO's: 642-726;
   or any suitable combination thereof.

[0085] Also, preferably, in such an amino acid sequence, at least one of said stretches of amino acid residues forms part of the antigen binding site for binding against IL-6R.

[0086] In a more specific, but again non-limiting aspect, the invention relates to an amino acid sequence directed against IL-6R, that comprises two or more stretches of amino acid residues chosen from the group consisting of:
[0087] a) the amino acid sequences of SEQ ID NO's: 302-386;
[0088] b) amino acid sequences that have at least 80% amino acid identity with at least one of the amino acid sequences of SEQ ID NO's: 302-386;
[0089] c) amino acid sequences that have 3, 2, or 1 amino acid difference with at least one of the amino acid sequences of SEQ ID NO's: 302-386;
[0090] d) the amino acid sequences of SEQ ID NO's: 472-556;
[0091] e) amino acid sequences that have at least 80% amino acid identity with at least one of the amino acid sequences of SEQ ID NO's: 472-556;
[0092] f) amino acid sequences that have 3, 2, or 1 amino acid difference with at least one of the amino acid sequences of SEQ ID NO's: 472-556;
[0093] g) the amino acid sequences of SEQ ID NO's: 642-726;
[0094] h) amino acid sequences that have at least 80% amino acid identity with at least one of the amino acid sequences of SEQ ID NO's: 642-726;
[0095] i) amino acid sequences that have 3, 2, or 1 amino acid difference with at least one of the amino acid sequences of SEQ ID NO's: 642-726;
   such that (i) when the first stretch of amino acid residues corresponds to one of the amino acid sequences according to a), b) or c), the second stretch of amino acid residues corresponds to one of the amino acid sequences according to d), e), f), g), h) or i); (ii) when the first stretch of amino acid residues corresponds to one of the amino acid sequences according to d), e) or f), the second stretch of amino acid residues corresponds to one of the amino acid sequences according to a), b), c), g), h) or i); or (iii) when the first stretch of amino acid residues corresponds to one of the amino acid sequences according to g), h) or i), the second stretch of amino acid residues corresponds to one of the amino acid sequences according to a), b), c), d), e) or f).

[0096] In this specific aspect, the amino acid sequence preferably comprises two or more stretches of amino acid residues chosen from the group consisting of:
[0097] i) the amino acid sequences of SEQ ID NO's: 302-386;
[0098] ii) the amino acid sequences of SEQ ID NO's: 472-556; and
[0099] iii) the amino acid sequences of SEQ ID NO's: 642-726;
   such that, (i) when the first stretch of amino acid residues corresponds to one of the amino acid sequences of SEQ ID NO's: 302-386, the second stretch of amino acid residues corresponds to one of the amino acid sequences of SEQ ID NO's: 472-556 or of SEQ ID NO's: 642-726; (ii) when the first stretch of amino acid residues corresponds to one of the amino acid sequences of SEQ ID NO's: 472-556, the second stretch of amino acid residues corresponds to one of the amino acid sequences of SEQ ID NO's: 302-386 or of SEQ ID NO's: 642-726; or (iii) when the first stretch of amino acid residues corresponds to one of the amino acid sequences of SEQ ID NO's: 642-726, the second stretch of amino acid residues corresponds to one of the amino acid sequences of SEQ ID NO's: 302-386 or of SEQ ID NO's: 472-556.

[0100] Also, in such an amino acid sequence, the at least two stretches of amino acid residues again preferably form part of the antigen binding site for binding against IL-6R.

[0101] In an even more specific, but non-limiting aspect, the invention relates to an amino acid sequence directed against IL-6R, that comprises three or more stretches of amino acid residues, in which the first stretch of amino acid residues is chosen from the group consisting of:
[0102] a) the amino acid sequences of SEQ ID NO's: 302-386;
[0103] b) amino acid sequences that have at least 80% amino acid identity with at least one of the amino acid sequences of SEQ ID NO's: 302-386;
[0104] c) amino acid sequences that have 3, 2, or 1 amino acid difference with at least one of the amino acid sequences of SEQ ID NO's: 302-386;
   the second stretch of amino acid residues is chosen from the group consisting of:
[0105] d) the amino acid sequences of SEQ ID NO's: 472-556;
[0106] e) amino acid sequences that have at least 80% amino acid identity with at least one of the amino acid sequences of SEQ ID NO's: 472-556;
[0107] f) amino acid sequences that have 3, 2, or 1 amino acid difference with at least one of the amino acid sequences of SEQ ID NO's: 472-556;
   and the third stretch of amino acid residues is chosen from the group consisting of:
[0108] g) the amino acid sequences of SEQ ID NO's: 642-726;
[0109] h) amino acid sequences that have at least 80% amino acid identity with at least one of the amino acid sequences of SEQ ID NO's: 642-726;
[0110] i) amino acid sequences that have 3, 2, or 1 amino acid difference with at least one of the amino acid sequences of SEQ ID NO's: 642-726.

[0111] Preferably, in this specific aspect, the first stretch of amino acid residues is chosen from the group consisting of the amino acid sequences of SEQ ID NO's: 302-386; the second stretch of amino acid residues is chosen from the group consisting of the amino acid sequences of SEQ ID NO's: 472-556; and the third stretch of amino acid residues is chosen from the group consisting of the amino acid sequences of SEQ ID NO's: 642-726.

[0112] Again, preferably, in such an amino acid sequence, the at least three stretches of amino acid residues forms part of the antigen binding site for binding against IL-6R.

[0113] Preferred combinations of such stretches of amino acid sequences will become clear from the further disclosure herein.

[0114] Preferably, in such amino acid sequences the CDR sequences have at least 70% amino acid identity, preferably at least 80% amino acid identity, more preferably at least 90% amino acid identity, such as 95% amino acid identity or more or even essentially 100% amino acid identity with the CDR sequences of at least one of the amino acid sequences of SEQ ID NO's: 132-216 (see Table A-1). This degree of amino acid identity can for example be determined by determining the degree of amino acid identity (in a manner described herein) between said amino acid sequence and one or more of the sequences of SEQ ID NO's: 132-216 (see Table A-3), in which the amino acid residues that form the framework regions are disregarded. Also, such amino acid sequences of the invention can be as further described herein.

[0115] Also, such amino acid sequences are preferably such that they can specifically bind (as defined herein) to IL-6R; and more in particular bind to IL-6R with an affinity (suitably measured and/or expressed as a K_{D}-value (actual or apparent), a K_{A}-value (actual or apparent), a kₒₙ-rate and/or a k_{off}-rate, or alternatively as an IC₅₀ value, as further described herein) that is as defined herein.

[0116] When the amino acid sequence of the invention essentially consists of 4 framework regions (FR1 to FR4, respectively) and 3 complementarity determining regions (CDR1 to CDR3, respectively), the amino acid sequence of the invention is preferably such that:

[0117] CDR1 is chosen from the group consisting of:
[0118] a) the amino acid sequences of SEQ ID NO's: 302-386;
[0119] b) amino acid sequences that have at least 80% amino acid identity with at least one of the amino acid sequences of SEQ ID NO's: 302-386;
[0120] c) amino acid sequences that have 3, 2, or 1 amino acid difference with at least one of the amino acid sequences of SEQ ID NO's: 302-386;
   and/or

[0121] CDR2 is chosen from the group consisting of:
[0122] d) the amino acid sequences of SEQ ID NO's: 472-556;
[0123] e) amino acid sequences that have at least 80% amino acid identity with at least one of the amino acid sequences of SEQ ID NO's: 472-556;
[0124] f) amino acid sequences that have 3, 2, or 1 amino acid difference with at least one of the amino acid sequences of SEQ ID NO's: 472-556;
   and/or

[0125] CDR3 is chosen from the group consisting of:
[0126] g) the amino acid sequences of SEQ ID NO's: 642-726;
[0127] h) amino acid sequences that have at least 80% amino acid identity with at least one of the amino acid sequences of SEQ ID NO's: 642-726;
[0128] i) amino acid sequences that have 3, 2, or 1 amino acid difference with at least one of the amino acid sequences of SEQ ID NO's: 642-726.

[0129] In particular, such an amino acid sequence of the invention may be such that CDR1 is chosen from the group consisting of the amino acid sequences of SEQ ID NO's: 302-386; and/or CDR2 is chosen from the group consisting of the amino acid sequences of SEQ ID NO's: 472-556; and/or CDR3 is chosen from the group consisting of the amino acid sequences of SEQ ID NO's: 642-726.

[0130] In particular, when the amino acid sequence of the invention essentially consists of 4 framework regions (ER1 to FR4, respectively) and 3 complementarity determining regions (CDR1 to CDR3, respectively), the amino acid sequence of the invention is preferably such that:

[0131] CDR1 is chosen from the group consisting of:
[0132] a) the amino acid sequences of SEQ ID NO's: 302-386;
[0133] b) amino acid sequences that have at least 80% amino acid identity with at least one of the amino acid sequences of SEQ ID NO's: 302-386;
[0134] c) amino acid sequences that have 3, 2, or 1 amino acid difference with at least one of the amino acid sequences of SEQ ID NO's: 302-386;
   and

[0135] CDR2 is chosen from the group consisting of:
[0136] d) the amino acid sequences of SEQ ID NO's: 472-556;
[0137] e) amino acid sequences that have at least 80% amino acid identity with at least one of the amino acid sequences of SEQ ID NO's: 472-556;
[0138] f) amino acid sequences that have 3, 2, or 1 amino acid difference with at least one of the amino acid sequences of SEQ ID NO's: 472-556;
   and

[0139] CDR3 is chosen from the group consisting of:
[0140] g) the amino acid sequences of SEQ ID NO's: 642-726;
[0141] h) amino acid sequences that have at least 80% amino acid identity with at least one of the amino acid sequences of SEQ ID NO's: 642-726;
[0142] i) amino acid sequences that have 3, 2, or 1 amino acid difference with at least one of the amino acid sequences of SEQ ID NO's: 642-726; or any suitable fragment of such an amino acid sequence

[0143] In particular, such an amino acid sequence of the invention may be such that CDR1 is chosen from the group consisting of the amino acid sequences of SEQ ID NO's: 302-386; and CDR2 is chosen from the group consisting of the amino acid sequences of SEQ ID NO's: 472-556; and CDR3 is chosen from the group consisting of the amino acid sequences of SEQ ID NO's: 642-726.

[0144] Again, preferred combinations of CDR sequences will become clear from the further description herein.

[0145] Also, such amino acid sequences are preferably such that they can specifically bind (as defined herein) to IL-6R; and more in particular bind to IL-6R with an affinity (suitably measured and/or expressed as a K_{D}-value (actual or apparent), a K_{A}-value (actual or apparent), a kₒₙ-rate and/or a k_{off}-rate, or alternatively as an IC₅₀ value, as further described herein) that is as defined herein.

[0146] In one preferred, but non-limiting aspect, the invention relates to an amino acid sequence that essentially consists of 4 framework regions (FR1 to FR4, respectively) and 3 complementarity determining regions (CDR1 to CDR3, respectively), in which the CDR sequences of said amino acid sequence have at least 70% amino acid identity, preferably at least 80% amino acid identity, more preferably at least 90% amino acid identity, such as 95% amino acid identity or more or even essentially 100% amino acid identity with the CDR sequences of at least one of the amino acid sequences of SEQ ID NO's: 132-216 (see Table A-1). This degree of amino acid identity can for example be determined by determining the degree of amino acid identity (in a manner described herein) between said amino acid sequence and one or more of the sequences of SEQ ID NO's: 132-216 (see Table A-3), in which the amino acid residues that form the framework regions are disregarded. Such amino acid sequences of the invention can be as further described herein.

[0147] In such an amino acid sequence of the invention, the framework sequences may be any suitable framework sequences, and examples of suitable framework sequences will be clear to the skilled person, for example on the basis the standard handbooks and the further disclosure and prior art mentioned herein.

[0148] The framework sequences are preferably (a suitable combination of) immunoglobulin framework sequences or framework sequences that have been derived from immunoglobulin framework sequences (for example, by humanization or camelization). For example, the framework sequences may be framework sequences derived from a light chain variable domain (e.g. a V_{L}-sequence) and/or from a heavy chain variable domain (e.g. a V_{H}-sequence). In one particularly preferred aspect, the framework sequences are either framework sequences that have been derived from a V_{HH}-sequence (in which said framework sequences may optionally have been partially or fully humanized) or are conventional V_{H} sequences that have been camelized (as defined herein).

[0149] The framework sequences are preferably such that the amino acid sequence of the invention is a domain antibody (or an amino acid sequence that is suitable for use as a domain antibody); is a single domain antibody (or an amino acid sequence that is suitable for use as a single domain antibody); is a “dAb” (or an amino acid sequence that is suitable for use as a dAb); or is a Nanobody (including but not limited to V_{HH} sequence). Again, suitable framework sequences will be clear to the skilled person, for example on the basis the standard handbooks and the further disclosure and prior art mentioned herein.

[0150] In particular, the framework sequences present in the amino acid sequences of the invention may contain one or more of Hallmark residues (as defined herein), such that the amino acid sequence of the invention is a Nanobody (also referred to as “Nanobody of the invention”). Some preferred, but non-limiting examples of (suitable combinations of) such framework sequences will become clear from the further disclosure herein.

[0151] The invention also provides compounds and constructs, and in particular proteins and polypeptides (also referred to herein as “compound of the invention”, “construct of the invention” and “polypeptide of the invention”), that comprise or essentially consists of at least one such amino acid sequence and/or Nanobody of the invention (or suitable fragments thereof), and optionally further comprises one or more other groups, residues, moieties or binding units. As will become clear to the skilled person from the further disclosure herein, such further groups, residues, moieties, binding units or amino acid sequences may or may not provide further functionality to the amino acid sequence and/or Nanobody of the invention (and/or to the compound or construct in which it is present) and may or may not modify the properties of the amino acid sequence and/or Nanobody of the invention.

[0152] As will be clear from the further description above and herein, this means that the amino acid sequences of the invention can be used as “building blocks” to form polypeptides (preferably biparatopic or multiparatopic polypeptides) of the invention, i.e. by suitably combining them with other groups, residues, moieties or binding units, in order to form compounds or constructs as described herein (such as, without limitations, the bi/multiparatopic. bi/multivalent and bi/multispecific polypeptides of the invention described herein) which combine within one molecule one or more desired properties or biological functions.

[0153] The compounds or polypeptides of the invention can generally be prepared by a method which comprises at least one step of suitably linking the one or more amino acid sequences and/or Nanobodies of the invention to the one or more further groups, residues, moieties or binding units, optionally via the one or more suitable linkers, so as to provide the compound or polypeptide of the invention. Polypeptides of the invention can also be prepared by a method which generally comprises at least the steps of providing a nucleic acid that encodes a polypeptide of the invention, expressing said nucleic acid in a suitable manner, and recovering the expressed polypeptide of the invention. Such methods can be performed in a manner known per se, which will be clear to the skilled person, for example on the basis of the methods and techniques further described herein.

[0154] Accordingly, the present invention also relates to the use of a monovalent construct (which may comprise or essentially consists of an amino acid sequence such as a domain antibody, an amino acid sequence that is suitable for use as a domain antibody, a single domain antibody, an amino acid sequence that is suitable for use as a single domain antibody, a “dAb”, an amino acid sequences that is suitable for use as a dAb, or a Nanobody) in providing and/or preparing a multivalent (such as multiparatopic, and preferably biparatopic) compound, construct or polypeptide. The monovalent construct that is used as a binding domain or binding unit may comprise or essentially consists of any amino acid sequences and/or Nanobodies that is capable of binding to at least one antigenic determinant, epitope, part or domain on IL-6R. Preferred amino acid sequences and/or Nanobodies are e.g. described in WO 08/020,079 and/or are described herein (referred to herein as “amino acid sequence of the invention” and “Nanobody of the invention”).

[0155] The monovalent construct that is used as a binding domain or binding unit may bind any antigenic determinant, epitope, part or domain on IL-6R. In a preferred aspect, the monovalent construct binds an epitope present in the extracellular D1 domain and/or it may be capable of specifically binding IL-6R while not binding the hybrid IL-6R (as described in Example 3; SEQ ID NO: 131); or it may be capable of binding an epitope present in the extracellular D2 domain and/or D3 domain and/or it may be capable of specifically binding IL-6R as well as the hybrid IL-6R (as described in Example 3; SEQ ID NO: 131). For example, the monovalent construct may be directed against the IL-6 binding site on IL-6R. In particular it may be directed against one or more of the 18 contact residues as described in Boulanger et al. 2003 (Science 300, 2101-2104) present in the extracellular D3 domain of the IL-6R, more preferably against amino acid residues Phe229 and Phe279 present in the extracellular D3 domain of the IL-6R) and/or it may be capable of competing with IL-6 for binding to IL-6R; the monovalent construct may be directed against the gp130 binding site on IL-6R and/or the IL-6/IL-6R complex and/or may be capable of competing with gp130 for binding to the IL-6/IL-6R complex; the monovalent construct may be directed against the Tocilizumab (MRA) binding site on IL-6R and/or may be capable of competing with Tocilizumab (MRA) for binding to IL-6R; the monovalent construct may be directed against the M182 binding site on IL-6R and/or may be capable of competing with M182 for binding to IL-6R; and/or the monovalent construct may be directed against the BN-12 binding site on IL-6R and/or may be capable of competing with BN-12 for binding to IL-6R.

[0156] As discussed above, the at least one further amino acid sequence and/or Nanobody that is used as a binding domain or binding unit in providing and/or preparing a multiparatopic (such as biparatopic) construct of the invention may be any amino acid sequence and/or Nanobody that is directed against and/or capable of binding IL-6R. In a preferred but non-limiting aspect, the at least one further amino acid sequence and/or Nanobody binds an epitope present in the extracellular D1 domain and/or it may be capable of capable of specifically binding IL-6R while not binding the hybrid IL-6R (as described in Example 3; SEQ ID NO: 131); or it may be capable of binding an epitope present in the extracellular D2 domain and/or D3 domain and/or it may be capable of specifically binding IL-6R as well as the hybrid IL-6R (as described in Example 3; SEQ ID NO: 131). In another preferred but non-limiting aspect, the at least one further amino acid sequence and/or Nanobody may be directed against the IL-6 binding site on IL-6R. In particular it may be directed against one or more of the 18 contact residues as described in Boulanger et al. 2003 (Science 300, 2101-2104) present in the extracellular D3 domain of the IL-6R, more preferably against amino acid residues Phe229 and Phe279 present in the extracellular D3 domain of the IL-6R) and/or it may be capable of competing with IL-6 for binding to IL-6R; the at least one further amino acid sequence and/or Nanobody may be directed against the gp130 binding site on IL-6R and/or the IL-6/IL-6R complex and/or may be capable of competing with gp130 for binding to the IL-6/IL-6R complex; the at least one further amino acid sequence and/or Nanobody may be directed against the Tocilizumab (MRA) binding site on IL-6R and/or may be capable of competing with Tocilizumab (MRA) for binding to IL-6R; the at least one further amino acid sequence and/or Nanobody may be directed against the M182 binding site on IL-6R and/or may be capable of competing with M182 for binding to IL-6R; and/or the at least one further amino acid sequence and/or Nanobody may be directed against the BN-12 binding site on IL-6R and/or may be capable of competing with BN-12 for binding to IL-6R.

[0157] In a preferred aspect the monovalent constructs, amino acid sequences and/or Nanobodies used in the preparation of the multiparatopic, and preferably biparatopic polypeptides of the invention are monovalent constructs, amino acid sequences and/or Nanobodies of the invention as described herein. More preferably, the monovalent constructs, amino acid sequences and/or Nanobodies used in the preparation of the multiparatopic, and preferably biparatopic polypeptides of the invention are selected from SEQ ID NO's: 132-216.

[0158] Accordingly the present invention also relates to the use of an amino acid sequence selected from SEQ ID NO's: 132-216 for preparing a multiparatopic, and preferably biparatopic polypeptides of the invention. Some preferred biparatopic polypeptides of the invention may be chosen from SEQ ID NO's: 828-963.

[0159] The present invention also relates to the use of a nucleic acid or nucleotide sequence that encodes a monovalent construct of the invention for the preparation of a genetic construct (as further defined herein) that encodes a multivalent (such as multiparatopic, and preferably biparatopic) construct.

[0160] In the multiparatopic (preferably biparatopic) polypeptide of the invention that comprises Nanobodies directed against two or more (preferably two) different antigenic determinants on IL-6R (for example against different epitopes of IL-6R), the length and flexibility of the linker are preferably such that, when the multiparatopic (preferably biparatopic) polypeptide binds to IL-6R, at least two and preferably all of the Nanobodies that are present in the multiparatopic (preferably biparatopic) polypeptide can (simultaneously) bind to each of their intended antigenic determinants, epitopes, parts or domains, most preferably so as to allow binding with increased avidity and also intramolecular binding and/or recognition. Again, based on the disclosure herein, the skilled person will be able to determine the optimal linker(s) for use in a specific polypeptide of the invention, optionally after some limited routine experiments.

[0161] Also encompassed within the present invention are methods for preparing and generating multiparatopic (such as e.g. biparatopic, triparatopic, etc.) polypeptides of the invention. Methods for preparing and generating the multiparatopic (such as e.g. biparatopic, triparatopic, etc.) polypeptides of the invention will be clear to the skilled person based on the description herein and/or are as further described herein.

[0162] In another aspect, the invention relates to a nucleic acid that encodes an amino acid sequence, a Nanobody, a polypeptide, and preferably a biparatopic (or multiparatopic) polypeptide of the invention (or a suitable fragment thereof). Such a nucleic acid will also be referred to herein as a “nucleic acid of the invention” and may for example be in the form of a genetic construct, as further described herein. Again, as generally described herein for the nucleic acids of the invention, such a nucleic acid may be in the form of a genetic construct, as defined herein.

[0163] In another aspect, the invention relates to a host or host cell that expresses (or that under suitable circumstances is capable of expressing) an amino acid sequence, a Nanobody, a polypeptide, and preferably a biparatopic (or multiparatopic) polypeptide of the invention; and/or that contains a nucleic acid of the invention. Some preferred but non-limiting examples of such hosts or host cells will become clear from the further description herein.

[0164] Another aspect of the invention relates to a product or composition, such as pharmaceutical compositions, containing or comprising at least one amino acid sequence and/or Nanobody of the invention, at least one polypeptide and preferably biparatopic (or multiparatopic) polypeptide of the invention and/or at least one nucleic acid of the invention, and optionally one or more further components of such compositions known per se, i.e. depending on the intended use of the composition. Such a product or composition may for example be a pharmaceutical composition (as described herein), a veterinary composition or a product or composition for diagnostic use (as also described herein). Some preferred but non-limiting examples of such products or compositions will become clear from the further description herein.

[0165] The invention further relates to applications and uses of the amino acid sequences, Nanobodies, compounds, constructs, polypeptides, and preferably biparatopic (or multiparatopic) polypeptides, nucleic acids, host cells, products and compositions described herein, as well as to methods for the prevention and/or treatment for diseases and disorders associated with IL-6R. Some preferred but non-limiting applications and uses will become clear from the further description herein.

[0166] The amino acid sequences, Nanobodies, compounds, constructs, polypeptides, and preferably biparatopic (or multiparatopic) polypeptides, and compositions of the present invention can generally be used to modulate, and in particular inhibit and/or prevent, binding of IL-6R to IL-6 and/or binding of the IL-6/IL-6R complex to gp130 and thus to modulate, and in particular inhibit or prevent, the signalling that is mediated by IL-6R, IL-6, IL6/IL-6R complex or gp130 to modulate the biological pathways in which IL-6R, IL-6, the IL6/IL-6R complex and/or gp130 are involved, and/or to modulate the biological mechanisms, responses and effects associated with such signalling or these pathways.

[0167] In another aspect, the amino acid sequence, Nanobody, polypeptide and preferably biparatopic (or multiparatopic) polypeptide of the invention or the composition comprising the same is an antagonist of IL-6R and will inhibit, decrease, downregulate and/or block signalling mediated by IL-6, IL-6R, the IL-6/IL-6R complex and/or gp130 and/or the pathway(s) and/or mechanism(s) in which IL-6, IL-6R, the IL-6/IL-6R complex or gp130 are involved. In a preferred aspect, the amino acid sequence, Nanobody, polypeptide and preferably biparatopic (or multiparatopic) polypeptide of the invention or the composition comprising the same will inhibit, decrease, downregulate and/or block signalling mediated by IL-6, IL-6R, the IL-6/IL-6R complex and/or gp130 and/or the pathway(s) and/or mechanism(s) in which IL-6, IL-6R, the IL-6/IL-6R complex or gp130 are involved equally or better than the reference IgG and/or the reference Fab. In another preferred aspect, the amino acid sequence, Nanobody, polypeptide and preferably biparatopic (or multiparatopic) polypeptide of the invention or the composition comprising the same will inhibit, decrease, downregulate and/or block signalling mediated by IL-6, IL-6R, the IL-6/IL-6R complex and/or gp130 and/or the pathway(s) and/or mechanism(s) in which IL-6, IL-6R, the IL-6/IL-6R complex or gp130 are involved equally or better than Tocilizumab (MRA). In another preferred aspect, the amino acid sequence, Nanobody, polypeptide and preferably biparatopic (or multiparatopic) polypeptide of the invention or the composition comprising the same will inhibit, decrease, downregulate and/or block signalling mediated by IL-6, IL-6R, the IL-6/IL-6R complex and/or gp130 and/or the pathway(s) and/or mechanism(s) in which IL-6, IL-6R, the IL-6/IL-6R complex or gp130 are involved equally or better than M182.

[0168] The amino acid sequences, Nanobodies, polypeptide and preferably biparatopic (or multiparatopic) polypeptides and compositions of the invention are also preferably (but without limitation) such that they effect a decrease (i.e. by at least 1 percent such as by at least 10 percent, preferably by at least 30 percent, more preferably by at least 50 percent, even more preferably by at least 75 percent or more) or a total inhibition of the induction of C-reactive protein (CRP) in a mammal (such as in a human subject or in a suitable animal model for inflammation such as the a cynomologus monkey) when they are administered to said mammal in a therapeutically relevant amount compared to a mammal not receiving the amino acid sequence, Nanobody, polypeptide and preferably biparatopic (or multiparatopic) polypeptide, compound or composition of the invention. Preferably, the amino acid sequences, Nanobodies, polypeptides and preferably biparatopic (or multiparatopic) polypeptides and compositions comprising the same are (but without limitation) such that they effect a decrease of the induction of C-reactive protein (CRP) in a mammal (such as in a human subject or in a suitable animal model for inflammation such as the a cynomologus monkey) that is the same or better (at least 5%, preferably at least 10%, more preferably at least 20%, even more preferably at least 30% or more, such as at least 50% or more) compared to the decrease effected by the reference IgG and the reference Fab when administered to said mammal in a therapeutically relevant amount. Preferably, the amino acid sequences, Nanobodies, polypeptides and preferably biparatopic (or multiparatopic) polypeptides and compositions comprising the same are (but without limitation) such that they effect a decrease of the induction of C-reactive protein (CRP) in a mammal (such as in a human subject or in a suitable animal model for inflammation such as the a cynomologus monkey) that is the same or better (at least 5%, preferably at least 10%, more preferably at least 20%, even more preferably at least 30% or more, such as at least 50% or more) compared to the decrease effected by Tocilizumab (MRA) when administered to said mammal in a therapeutically relevant amount. Preferably, the amino acid sequences, Nanobodies, polypeptides and preferably biparatopic (or multiparatopic) polypeptides and compositions comprising the same are (but without limitation) such that they effect a decrease of the induction of C-reactive protein (CRP) in a mammal (such as in a human subject or in a suitable animal model for inflammation such as the a cynomologus monkey) that is the same or better (at least 5%, preferably at least 10%, more preferably at least 20%, even more preferably at least 30% or more, such as at least 50% or more) compared to the decrease effected by M182 when administered to said mammal in a therapeutically relevant amount.

[0169] The amino acid sequences, Nanobodies, polypeptides and preferably biparatopic (or multiparatopic) polypeptides and compositions comprising the same are also preferably (but without limitation) such that they effect a decrease (i.e. by at least 1 percent such as by at least 10 percent, preferably by at least 30 percent, more preferably by at least 50 percent, even more preferably by at least 75 percent or more) or a total inhibition of the induction of the platelet count in a mammal (such as in a human subject or in a suitable animal model for inflammation such as the a cynomologus monkey) when they are administered to said mammal in a therapeutically relevant amount compared to a mammal not receiving the amino acid sequence, Nanobody, polypeptide and preferably biparatopic (or multiparatopic) polypeptide or compositions comprising the same. Preferably, the amino acid sequences, Nanobodies, polypeptides and preferably biparatopic (or multiparatopic) polypeptides and compositions comprising the same are (but without limitation) such that they effect a decrease of the induction of the platelet count in a mammal (such as in a human subject or in a suitable animal model for inflammation such as the a cynomologus monkey) that is the same or better (at least 5%, preferably at least 10%, more preferably at least 20%, even more preferably at least 30% or more, such as at least 50% or more) compared to the decrease effected by the reference IgG and/or the reference Fab when administered to said mammal in a therapeutically relevant amount. Preferably, the amino acid sequences, Nanobodies, polypeptides and preferably biparatopic (or multiparatopic) polypeptides and compositions comprising the same are (but without limitation) such that they effect a decrease of the induction of the platelet count in a mammal (such as in a human subject or in a suitable animal model for inflammation such as the a cynomologus monkey) that is the same or better (at least 5%, preferably at least 10%, more preferably at least 20%, even more preferably at least 30% or more, such as at least 50% or more) compared to the decrease effected by Tocilizumab (MRA) when administered to said mammal in a therapeutically relevant amount. Preferably, the amino acid sequences, Nanobodies, polypeptides and preferably biparatopic (or multiparatopic) polypeptides and compositions comprising the same are (but without limitation) such that they effect a decrease of the induction of the platelet count in a mammal (such as in a human subject or in a suitable animal model for inflammation such as the a cynomologus monkey) that is the same or better (at least 5%, preferably at least 10%, more preferably at least 20%, even more preferably at least 30% or more, such as at least 50% or more) compared to the decrease effected by M182 when administered to said mammal in a therapeutically relevant amount.

[0170] The amino acid sequences, Nanobodies, polypeptides and preferably biparatopic (or multiparatopic) polypeptides and compositions comprising the same are also preferably (but without limitation) such that they effect a decrease (i.e. by at least 1 percent such as by at least 10 percent, preferably by at least 30 percent, more preferably by at least 50 percent, even more preferably by at least 75 percent or more) or a total inhibition of the induction of fibrinogen in a mammal (such as in a human subject or in a suitable animal model for inflammation such as the cynomologus monkey) when they are administered to said mammal in a therapeutically relevant amount compared to a mammal not receiving the amino acid sequence, Nanobody, polypeptide and preferably biparatopic (or multiparatopic) polypeptide or compositions comprising the same. Preferably, the amino acid sequences, Nanobodies, polypeptides and preferably biparatopic (or multiparatopic) polypeptides and compositions comprising the same are (but without limitation) such that they effect a decrease of the induction of fibrinogen in a mammal (such as in a human subject or in a suitable animal model for inflammation such as the a cynomologus monkey) that is the same or better (at least 5%, preferably at least 10%, more preferably at least 20%, even more preferably at least 30% or more, such as at least 50% or more) compared to the decrease effected by the reference IgG and/or the reference Fab when administered to said mammal in a therapeutically relevant amount. Preferably, the amino acid sequences, Nanobodies, polypeptides and preferably biparatopic (or multiparatopic) polypeptides and compositions comprising the same are (but without limitation) such that they effect a decrease of the induction of fibrinogen in a mammal (such as in a human subject or in a suitable animal model for inflammation such as the a cynomologus monkey) that is the same or better (at least 5%, preferably at least 10%, more preferably at least 20%, even more preferably at least 30% or more, such as at least 50% or more) compared to the decrease effected by Tocilizumab (MRA) when administered to said mammal in a therapeutically relevant amount. Preferably, the amino acid sequences, Nanobodies, polypeptides and preferably biparatopic (or multiparatopic) polypeptides and compositions comprising the same are (but without limitation) such that they effect a decrease of the induction of the fibrinogen in a mammal (such as in a human subject or in a suitable animal model for inflammation such as the a cynomologus monkey) that is the same or better (at least 5%, preferably at least 10%, more preferably at least 20%, even more preferably at least 30% or more, such as at least 50% or more) compared to the decrease effected by M182 when administered to said mammal in a therapeutically relevant amount.

[0171] As such, the amino acid sequences, Nanobodies, compounds, constructs, polypeptides, and preferably biparatopic (or multiparatopic) polypeptides, and compositions of the invention can be used for the prevention and treatment of diseases and disorders associated with IL-6R, IL-6 and/or with the IL-6/IL-6R complex (optionally in further complex with gp130), and/or with the signaling pathway(s) and/or the biological functions and responses in which IL-6 and/or the IL-6/IL-6R complex (optionally in further complex with gp130) are involved, and in particular for the prevention and treatment of diseases and disorders associated with IL-6R, IL-6 and/or with the IL-6/IL-6R complex (optionally in further complex with gp130), and/or with the signaling pathway(s) and/or the biological functions and responses in which IL-6R, IL-6 and/or with the IL-6/IL-6R complex (optionally in further complex with gp130) are involved, which are characterized by excessive and/or unwanted signalling mediated by IL-6R or by the pathway(s) in which IL-6R is involved. Examples of such diseases and disorders associated with IL-6R, IL-6 and/or with the IL-6/IL-6R complex, and/or with the signaling pathway(s) and/or the biological functions and responses in which IL-6 and/or the IL-6/IL-6R complex are involved, will be clear to the skilled person based on the disclosure herein, and for example include the following diseases and disorders: sepsis (Starnes et al., 1999) and various forms of cancer such as multiple myeloma disease (MM), renal cell carcinoma (RCC), plasma cell leukaemia (Klein et al., 1991), lymphoma, B-lymphoproliferative disorder (BLPD) and prostate cancer. Non-limiting examples of other diseases caused by excessive IL-6 production or signalling include bone resorption (osteoporosis) (Roodman et al., 1992; Jilka et al., 1992), cachexia (Strassman et al., 1992), psoriasis, mesangial proliferative glomerulonephritis, Kaposi's sarcoma, AIDS-related lymphoma (Emilie et al., 1994), inflammatory diseases and disorder such as rheumatoid arthritis, systemic onset juvenile idiopathic arthritis, hypergammaglobulinemia (Grau et al., 1990); Crohn's disease, ulcerative colitis, systemic lupus erythematosus (SLE), multiple sclerosis, Castleman's disease, IgM gammopathy, cardiac myxoma, asthma (in particular allergic asthma) and autoimmune insulin-dependent diabetes mellitus (Campbell et al., 1991). Other IL-6R, IL-6 and/or IL-6/IL-6R complex related disorders will be clear to the skilled person. Such diseases and disorders are also generally referred to herein as “IL-6R related disorders”.

[0172] The invention also relates to the amino acid sequences, compounds, constructs, polypeptides, and preferably biparatopic (or multiparatopic) polypeptides, nucleic acids, host cells, products and compositions described herein for use in therapy.

[0173] In particular, the invention also relates to the amino acid sequences, compounds, constructs, polypeptides, and preferably biparatopic (or multiparatopic) polypeptides, nucleic acids, host cells, products and compositions described herein for use in therapy of a disease or disorder that can be prevented or treated by administering, to a subject in need thereof, of (a pharmaceutically effective amount of) an amino acid sequence, compound, construct or polypeptide as described herein.

[0174] More in particular, the invention relates to the amino acid sequences, compounds, constructs, polypeptides, and preferably biparatopic (or multiparatopic) polypeptides nucleic acids, host cells, products and compositions described herein for use in therapy of various diseases and disorders, such as sepsis (Starnes et al., 1999) and various forms of cancer such as multiple myeloma disease (MM), renal cell carcinoma (RCC), plasma cell leukaemia (Klein et al., 1991), lymphoma, B-lymphoproliferative disorder (BLPD) and prostate cancer. Non-limiting examples of other diseases caused by excessive IL-6 production or signalling include bone resorption (osteoporosis) (Roodman et al., 1992; Jilka et al., 1992), cachexia (Strassman et al., 1992), psoriasis, mesangial proliferative glomerulonephritis, Kaposi's sarcoma, AIDS-related lymphoma (Emilie et al., 1994), inflammatory diseases and disorder such as rheumatoid arthritis, systemic onset juvenile idiopathic arthritis, hypergammaglobulinemia (Grau et al., 1990); Crohn's disease, ulcerative colitis, systemic lupus erythematosus (SLE), multiple sclerosis, Castleman's disease, IgM gammopathy, cardiac myxoma, asthma (in particular allergic asthma) and autoimmune insulin-dependent diabetes mellitus (Campbell et al., 1991).

[0175] Other applications and uses of the amino acid sequences, Nanobodies, compounds, constructs, polypeptides, and preferably biparatopic (or multiparatopic) polypeptides, and compositions of the invention will become clear to the skilled person from the further disclosure herein.

[0176] Other aspects, embodiments, advantages and applications of the invention will also become clear from the further description herein, in which the invention will be described and discussed in more detail with reference to the amino acid sequences, Nanobodies of the invention and polypeptides, and preferably biparatopic (or multiparatopic) polypeptides of the invention comprising the same, which form some of the preferred aspects of the invention.

[0177] Generally, it is an object of the invention to provide pharmacologically active agents, as well as compositions comprising the same, that can be used in the diagnosis, prevention and/or treatment of one or more IL-6R related disorders (as defined herein); and to provide methods for the diagnosis, prevention and/or treatment of such diseases and disorders that involve the administration and/or use of such agents and compositions.

[0178] More in particular, it is an object of the invention to provide therapeutic proteins that can be used as pharmacologically active agents, as well as compositions comprising the same, for the diagnosis, prevention and/or treatment of one or more IL-6R related disorders (as defined herein); and to provide methods for the diagnosis, prevention and/or treatment of such diseases and disorders that involve the administration and/or the use of such therapeutic proteins and compositions.

[0179] In the invention, generally, these objects are achieved by the use of the amino acid sequences, Nanobodies, compounds, constructs, polypeptides, and preferably biparatopic (or multiparatopic) polypeptides, and compositions that are described herein.

[0180] As will become clear from the further description herein, Nanobodies generally offer certain advantages (outlined herein) compared to “dAb's” or similar (single) domain antibodies or immunoglobulin sequences, which advantages are also provided by the Nanobodies of the invention. However, it will be clear to the skilled person that the more general aspects of the teaching below can also be applied (either directly or analogously) to other amino acid sequences of the invention.

### BRIEF DESCRIPTION OF THE DRAWINGS

[0181] FIG. 1: Hybrid IL-6R amino acid sequence (SEQ ID NO: 131). FIG. 2 Analysis of immune response in llamas 128b, 129b and 130b by FACS analysis.

[0182] Antigen specific serum titer is shown of llama 128b (FIG. 2a), llama 129b (FIG. 2b) and llama 130b (FIG. 2c) on IL-6R-transfected CHO cells. The total IgG (conventional and heavy chain antibody mediated) was measured. (CHO-K1 is shown on the left hand side and CHO HuIL6-R 4D6 is shown on the right hand side of each bar-graph pair)

[0183] FIG. 3: Schematic representation of Alphascreen assays used to identify Nanobodies against the IL-6 binding site on IL-6R.

[0184] FIG. 4: Potency of the Nanobodies to inhibit the binding of human IL-6 to human soluble IL-6R (FIG. 4a), and cynomolgus monkey soluble IL-6R (FIG. 4b) present in plasma. The anti-IL-6R biparatopic Nanobody IL6R0402 was compared with the monovalent Nanobody.

[0185] FIG. 5: Antagonistic activity of Nanobodies in cell-based assay (TF-1). The anti-IL-6R biparatopic Nanobodies IL6R0401 and IL6R0402 were compared with the monovalent Nanobody.

### DETAILED DESCRIPTION

[0186] In the present description, examples and claims:
[0187] a) Unless indicated or defined otherwise, all terms used have their usual meaning in the art, which will be clear to the skilled person. Reference is for example made to the standard handbooks mentioned in paragraph a) on page 46 of WO 08/020,079.
[0188] b) Unless indicated otherwise, the terms “immunoglobulin sequence”, “sequence”, “nucleotide sequence” and “nucleic acid” are as described in paragraph b) on page 46 of WO 08/020,079.
[0189] c) Unless indicated otherwise, all methods, steps, techniques and manipulations that are not specifically described in detail can be performed and have been performed in a manner known per se, as will be clear to the skilled person. Reference is for example again made to the standard handbooks and the general background art mentioned herein and to the further references cited therein; as well as to for example the following reviews Presta, Adv. Drug Deliv. Rev. 2006, 58 (5-6): 640-56; Levin and Weiss, Mol. Biosyst. 2006, 2(1): 49-57; Irving et al., J. Immunol. Methods, 2001, 248(1-2), 31-45; Schmitz et al., Placenta, 2000, 21 Suppl. A, 5106-12, Gonzales et al., Tumour Biol., 2005, 26(1), 31-43, which describe techniques for protein engineering, such as affinity maturation and other techniques for improving the specificity and other desired properties of proteins such as immunoglobulins.
[0190] d) Amino acid residues will be indicated according to the standard three-letter or one-letter amino acid code. Reference is made to Table A-2 on page 48 of the International application WO 08/020,079 of Ablynx N.V. entitled “Amino acid sequences directed against IL-6R and polypeptides comprising the same for the treatment of diseases and disorders associated with Il-6 mediated signalling”.
[0191] e) For the purposes of comparing two or more nucleotide sequences, the percentage of “sequence identity” between a first nucleotide sequence and a second nucleotide sequence may be calculated or determined as described in paragraph e) on page 49 of WO 08/020,079 (incorporated herein by reference), such as by dividing [the number of nucleotides in the first nucleotide sequence that are identical to the nucleotides at the corresponding positions in the second nucleotide sequence] by [the total number of nucleotides in the first nucleotide sequence] and multiplying by [100%], in which each deletion, insertion, substitution or addition of a nucleotide in the second nucleotide sequence—compared to the first nucleotide sequence—is considered as a difference at a single nucleotide (position); or using a suitable computer algorithm or technique, again as described in paragraph e) on pages 49 of WO 08/020,079 (incorporated herein by reference).
[0192] f) For the purposes of comparing two or more amino acid sequences, the percentage of “sequence identity” between a first amino acid sequence and a second amino acid sequence (also referred to herein as “amino acid identity”) may be calculated or determined as described in paragraph f) on pages 49 and 50 of WO 08/020,079 (incorporated herein by reference), such as by dividing [the number of amino acid residues in the first amino acid sequence that are identical to the amino acid residues at the corresponding positions in the second amino acid sequence] by [the total number of amino acid residues in the first amino acid sequence] and multiplying by [100%], in which each deletion, insertion, substitution or addition of an amino acid residue in the second amino acid sequence—compared to the first amino acid sequence—is considered as a difference at a single amino acid residue (position), i.e. as an “amino acid difference” as defined herein; or using a suitable computer algorithm or technique, again as described in paragraph f) on pages 49 and 50 of WO 08/020,079 (incorporated herein by reference).
   [0193] Also, in determining the degree of sequence identity between two amino acid sequences, the skilled person may take into account so-called “conservative” amino acid substitutions, as described on page 50 of WO 08/020,079.
   [0194] Any amino acid substitutions applied to the polypeptides described herein may also be based on the analysis of the frequencies of amino acid variations between homologous proteins of different species developed by Schulz et al., Principles of Protein Structure, Springer-Verlag, 1978, on the analyses of structure forming potentials developed by Chou and Fasman, Biochemistry 13: 211, 1974 and Adv. Enzymol., 47: 45-149, 1978, and on the analysis of hydrophobicity patterns in proteins developed by Eisenberg et al., Proc. Natl. Acad. Sci. USA 81: 140-144, 1984; Kyte & Doolittle; J. Molec. Biol. 157: 105-132, 198 1, and Goldman et al., Ann. Rev. Biophys. Chem. 15: 321-353, 1986, all incorporated herein in their entirety by reference. Information on the primary, secondary and tertiary structure of Nanobodies is given in the description herein and in the general background art cited above. Also, for this purpose, the crystal structure of a V_{HH} domain from a llama is for example given by Desmyter et al., Nature Structural Biology, Vol. 3, 9, 803 (1996); Spinelli et al., Natural Structural Biology (1996); 3, 752-757; and Decanniere et al., Structure, Vol. 7, 4, 361 (1999). Further information about some of the amino acid residues that in conventional V_{H} domains form the V_{H}/V_{L} interface and potential camelizing substitutions on these positions can be found in the prior art cited above.
[0195] g) Amino acid sequences and nucleic acid sequences are said to be “exactly the same” if they have 100% sequence identity (as defined herein) over their entire length.
[0196] h) When comparing two amino acid sequences, the term “amino acid difference” refers to an insertion, deletion or substitution of a single amino acid residue on a position of the first sequence, compared to the second sequence; it being understood that two amino acid sequences can contain one, two or more such amino acid differences.
[0197] i) When a nucleotide sequence or amino acid sequence is said to “comprise” another nucleotide sequence or amino acid sequence, respectively, or to “essentially consist of” another nucleotide sequence or amino acid sequence, this has the meaning given in paragraph i) on pages 51-52 of WO 08/020,079.
[0198] j) The term “in essentially isolated form” has the meaning given to it in paragraph j) on pages 52 and 53 of WO 08/020,079.
[0199] k) The terms “domain” and “binding domain” have the meanings given to it in paragraph k) on page 53 of WO 08/020,079.
[0200] l) The terms “antigenic determinant” and “epitope”, which may also be used interchangeably herein, have the meanings given to it in paragraph l) on page 53 of WO 08/020,079.
[0201] m) As further described in paragraph m) on page 53 of WO 08/020,079, an amino acid sequence (such as a Nanobody, an antibody, a polypeptide and preferably a biparatopic (or multiparatopic) polypeptide of the invention, or generally an antigen binding protein or polypeptide or a fragment thereof) that can (specifically) bind to, that has affinity for and/or that has specificity for a specific antigenic determinant, epitope, antigen or protein (or for at least one part, fragment or epitope thereof) is said to be “against” or “directed against” said antigenic determinant, epitope, antigen or protein.
[0202] n) The term “specificity” has the meaning given to it in paragraph n) on pages 53-56 of WO 08/020,079; and as mentioned therein refers to the number of different types of antigens or antigenic determinants to which a particular antigen-binding molecule or antigen-binding protein (such as a Nanobody or a polypeptide of the invention) molecule can bind. The specificity of an antigen-binding protein can be determined based on affinity and/or avidity, as described on pages 53-56 of WO 08/020,079 (incorporated herein by reference), which also describes some preferred techniques for measuring binding between an antigen-binding molecule (such as a Nanobody or polypeptide and preferably a biparatopic (or multiparatopic) polypeptide of the invention) and the pertinent antigen. Typically, antigen-binding proteins (such as the amino acid sequences, Nanobodies and/or polypeptides and preferably biparatopic (or multiparatopic) polypeptides of the invention) will bind to their antigen with a dissociation constant (K_{D}) of 10⁻⁵ to 10⁻¹² moles/liter or less, and preferably 10⁻⁷ to 10⁻¹² moles/liter or less and more preferably 10⁻⁸ to 10⁻¹² moles/liter (i.e. with an association constant (K_{A}) of 10⁵ to 10¹² liter/ moles or more, and preferably 10⁷ to 10¹² liter/moles or more and more preferably 10⁸ to 10¹² liter/moles). Any K_{D} value greater than 10⁴ mol/liter (or any K_{A} value lower than 10⁴ M⁻¹) liters/mol is generally considered to indicate non-specific binding. Preferably, a monovalent immunoglobulin sequence of the invention will bind to the desired antigen with an affinity less than 500 nM, preferably less than 200 nM, more preferably less than 10 nM, such as less than 500 μM. Specific binding of an antigen-binding protein to an antigen or antigenic determinant can be determined in any suitable manner known per se, including, for example, Scatchard analysis and/or competitive binding assays, such as radioimmunoassays (RIA), enzyme immunoassays (EIA) and sandwich competition assays, and the different variants thereof known per se in the art; as well as the other techniques mentioned herein. As will be clear to the skilled person, and as described on pages 53-56 of WO 08/020,079, the dissociation constant may be the actual or apparent dissociation constant. Methods for determining the dissociation constant will be clear to the skilled person, and for example include the techniques mentioned on pages 53-56 of WO 08/020,079.
[0203] o) The half-life of an amino acid sequence, compound, polypeptide and preferably a biparatopic (or multiparatopic) polypeptide of the invention can generally be defined as described in paragraph o) on page 57 of WO 08/020,079 and as mentioned therein refers to the time taken for the serum concentration of the amino acid sequence, compound, polypeptide or preferably biparatopic (or multiparatopic) polypeptide to be reduced by 50%, in vivo, for example due to degradation of the sequence or compound and/or clearance or sequestration of the sequence or compound by natural mechanisms. The in vivo half-life of an amino acid sequence, compound, polypeptide and preferably a biparatopic (or multiparatopic) polypeptide of the invention can be determined in any manner known per se, such as by pharmacokinetic analysis. Suitable techniques will be clear to the person skilled in the art, and may for example generally be as described in paragraph o) on page 57 of WO 08/020,079. As also mentioned in paragraph o) on page 57 of WO 08/020,079, the half-life can be expressed using parameters such as the t1/2-alpha, t1/2-beta and the area under the curve (AUC). Reference is for example made to the Experimental Part below, as well as to the standard handbooks, such as Kenneth, A et al: Chemical Stability of Pharmaceuticals: A Handbook for Pharmacists and Peters et al, Pharmacokinete analysis: A Practical Approach (1996). Reference is also made to “Pharmacokinetics”, M Gibaldi & D Perron, published by Marcel Dekker, 2nd Rev. edition (1982). The terms “increase in half-life” or “increased half-life” as also as defined in paragraph o) on page 57 of WO 08/020,079 and in particular refer to an increase in the t1/2-beta, either with or without an increase in the t1/2-alpha and/or the AUC or both.
[0204] p) In the context of the present invention, “modulating” or “to modulate” generally means either reducing or inhibiting the activity of, or alternatively increasing the activity of, a target or antigen, as measured using a suitable in vitro, cellular or in vivo assay. In particular, “modulating” or “to modulate” may mean either reducing or inhibiting the activity of, or alternatively increasing a (relevant or intended) biological activity of, a target or antigen, as measured using a suitable in vitro, cellular or in vivo assay (which will usually depend on the target or antigen involved), by at least 1%, preferably at least 5%, such as at least 10% or at least 25%, for example by at least 50%, at least 60%, at least 70%, at least 80%, or 90% or more, compared to activity of the target or antigen in the same assay under the same conditions but without the presence of the construct of the invention.
   [0205] As will be clear to the skilled person, “modulating” may also involve effecting a change (which may either be an increase or a decrease) in affinity, avidity, specificity and/or selectivity of a target or antigen for one or more of its ligands, binding partners, partners for association into a homomultimeric or heteromultimeric form, or substrates; and/or effecting a change (which may either be an increase or a decrease) in the sensitivity of the target or antigen for one or more conditions in the medium or surroundings in which the target or antigen is present (such as pH, ion strength, the presence of co-factors, etc.), compared to the same conditions but without the presence of the construct of the invention. As will be clear to the skilled person, this may again be determined in any suitable manner and/or using any suitable assay known per se, depending on the target or antigen involved.
   [0206] “Modulating” may also mean effecting a change (i.e. an activity as an agonist, as an antagonist or as a reverse agonist, respectively, depending on the target or antigen and the desired biological or physiological effect) with respect to one or more biological or physiological mechanisms, effects, responses, functions, pathways or activities in which the target or antigen (or in which its substrate(s), ligand(s) or pathway(s) are involved, such as its signalling pathway or metabolic pathway and their associated biological or physiological effects) is involved. Again, as will be clear to the skilled person, such an action as an agonist or an antagonist may be determined in any suitable manner and/or using any suitable (in vitro and usually cellular or in assay) assay known per se, depending on the target or antigen involved. In particular, an action as an agonist or antagonist may be such that an intended biological or physiological activity is increased or decreased, respectively, by at least 1%, preferably at least 5%, such as at least 10% or at least 25%, for example by at least 50%, at least 60%, at least 70%, at least 80%, or 90% or more, compared to the biological or physiological activity in the same assay under the same conditions but without the presence of the construct of the invention.
   [0207] Modulating may for example also involve allosteric modulation of the target or antigen; and/or reducing or inhibiting the binding of the target or antigen to one of its substrates or ligands and/or competing with a natural ligand, substrate for binding to the target or antigen. Modulating may also involve activating the target or antigen or the mechanism or pathway in which it is involved. Modulating may for example also involve effecting a change in respect of the folding or confirmation of the target or antigen, or in respect of the ability of the target or antigen to fold, to change its confirmation (for example, upon binding of a ligand), to associate with other (sub)units, or to disassociate. Modulating may for example also involve effecting a change in the ability of the target or antigen to transport other compounds or to serve as a channel for other compounds (such as ions).
   [0208] Modulating may be reversible or irreversible, but for pharmaceutical and pharmacological purposes will usually be in a reversible manner.
[0209] q) In respect of a target or antigen, the term “interaction site” on the target or antigen means a site, epitope, antigenic determinant, part, domain or stretch of amino acid residues on the target or antigen that is a site for binding to a ligand, receptor or other binding partner, a catalytic site, a cleavage site, a site for allosteric interaction, a site involved in multimerisation (such as homomerization or heterodimerization) of the target or antigen; or any other site, epitope, antigenic determinant, part, domain or stretch of amino acid residues on the target or antigen that is involved in a biological action or mechanism of the target or antigen. More generally, an “interaction site” can be any site, epitope, antigenic determinant, part, domain or stretch of amino acid residues on the target or antigen to which an amino acid sequence or polypeptide of the invention can bind such that the target or antigen (and/or any pathway, interaction, signalling, biological mechanism or biological effect in which the target or antigen is involved) is modulated (as defined herein).
[0210] r) An amino acid sequence or polypeptide is said to be “specific for” a first target or antigen compared to a second target or antigen when is binds to the first antigen with an affinity (as described above, and suitably expressed as a K_{D} value, K_{A} value, K_{off} rate and/or Kₒₙ rate) that is at least 10 times, such as at least 100 times, and preferably at least 1000 times, and up to 10.000 times or more better than the affinity with which said amino acid sequence or polypeptide binds to the second target or polypeptide. For example, the first antigen may bind to the target or antigen with a K_{D} value that is at least 10 times less, such as at least 100 times less, and preferably at least 1000 times less, such as 10.000 times less or even less than that, than the K_{D} with which said amino acid sequence or polypeptide binds to the second target or polypeptide. Preferably, when an amino acid sequence or polypeptide is “specific for” a first target or antigen compared to a second target or antigen, it is directed against (as defined herein) said first target or antigen, but not directed against said second target or antigen.
[0211] s) The terms “cross-block”, “cross-blocked” and “cross-blocking” are used interchangeably herein to mean the ability of an amino acid sequence or other binding agents (such as a Nanobody, polypeptide and preferably biparatopic (or multiparatopic) polypeptide or compound or construct of the invention) to interfere with the binding of other amino acid sequences or binding agents of the invention to a given target. The extend to which an amino acid sequence or other binding agents of the invention is able to interfere with the binding of another to IL-6R, and therefore whether it can be said to cross-block according to the invention, can be determined using competition binding assays. One particularly suitable quantitative cross-blocking assay uses a Biacore machine which can measure the extent of interactions using surface plasmon resonance technology. Another suitable quantitative cross-blocking assay uses an ELISA-based approach to measure competition between amino acid sequences or other binding agents in terms of their binding to the target.
   [0212] The following generally describes a suitable Biacore assay for determining whether an amino acid sequence or other binding agent cross-blocks or is capable of cross-blocking according to the invention. It will be appreciated that the assay can be used with any of the amino acid sequences or other binding agents described herein. The Biacore machine (for example the Biacore 3000) is operated in line with the manufacturer's recommendations. Thus in one cross-blocking assay, the target protein is coupled to a CM5 Biacore chip using standard amine coupling chemistry to generate a surface that is coated with the target. Typically 200-800 resonance units of the target would be coupled to the chip (an amount that gives easily measurable levels of binding but that is readily saturable by the concentrations of test reagent being used). Two test amino acid sequences (termed A* and B*) to be assessed for their ability to cross-block each other are mixed at a one to one molar ratio of binding sites in a suitable buffer to create the test mixture. When calculating the concentrations on a binding site basis the molecular weight of an amino acid sequence is assumed to be the total molecular weight of the amino acid sequence divided by the number of target binding sites on that amino acid sequence. The concentration of each amino acid sequence in the test mix should be high enough to readily saturate the binding sites for that amino acid sequence on the target molecules captured on the Biacore chip. The amino acid sequences in the mixture are at the same molar concentration (on a binding basis) and that concentration would typically be between 1.00 and 1.5 micromolar (on a binding site basis). Separate solutions containing A* alone and B* alone are also prepared. A* and B* in these solutions should be in the same buffer and at the same concentration as in the test mix. The test mixture is passed over the target-coated Biacore chip and the total amount of binding recorded. The chip is then treated in such a way as to remove the bound amino acid sequences without damaging the chip-bound target. Typically this is done by treating the chip with 30 mM HCl for 60 seconds. The solution of A* alone is then passed over the target-coated surface and the amount of binding recorded. The chip is again treated to remove all of the bound amino acid sequences without damaging the chip-bound target. The solution of B* alone is then passed over the target-coated surface and the amount of binding recorded. The maximum theoretical binding of the mixture of A* and B* is next calculated, and is the sum of the binding of each amino acid sequence when passed over the target surface alone. If the actual recorded binding of the mixture is less than this theoretical maximum then the two amino acid sequences are cross-blocking each other. Thus, in general, a cross-blocking amino acid sequence or other binding agent according to the invention is one which will bind to the target in the above Biacore cross-blocking assay such that, during the assay and in the presence of a second amino acid sequence or other binding agent of the invention, the recorded binding is between 80% and 0.1% (e.g. 80% to 4%) of the maximum theoretical binding, specifically between 75% and 0.1% (e.g. 75% to 4%) of the maximum theoretical binding, and more specifically between 70% and 0.1% (e.g. 70% to 4%) of maximum theoretical binding (as just defined above) of the two amino acid sequences or binding agents in combination. The Biacore assay described above is a primary assay used to determine if amino acid sequences or other binding agents cross-block each other according to the invention. On rare occasions particular amino acid sequences or other binding agents may not bind to target coupled via amine chemistry to a CM5 Biacore chip (this usually occurs when the relevant binding site on target is masked or destroyed by the coupling to the chip). In such cases cross-blocking can be determined using a tagged version of the target, for example a N-terminal His-tagged version. In this particular format, an anti-His amino acid sequence would be coupled to the Biacore chip and then the His-tagged target would be passed over the surface of the chip and captured by the anti-His amino acid sequence. The cross blocking analysis would be carried out essentially as described above, except that after each chip regeneration cycle, new His-tagged target would be loaded back onto the anti-His amino acid sequence coated surface. In addition to the example given using N-terminal His-tagged target, C-terminal His-tagged target could alternatively be used. Furthermore, various other tags and tag binding protein combinations that are known in the art could be used for such a cross-blocking analysis (e.g. HA tag with anti-HA antibodies; FLAG tag with anti-FLAG antibodies; biotin tag with streptavidin).
   [0213] The following generally describes an ELISA assay for determining whether an amino acid sequence or other binding agent directed against a target cross-blocks or is capable of cross-blocking as defined herein. It will be appreciated that the assay can be used with any of the amino acid sequences (or other binding agents such as polypeptides of the invention) described herein. The general principal of the assay is to have an amino acid sequence or binding agent that is directed against the target coated onto the wells of an ELISA plate. An excess amount of a second, potentially cross-blocking, anti-target amino acid sequence is added in solution (i.e. not bound to the ELISA plate). A limited amount of the target is then added to the wells. The coated amino acid sequence and the amino acid sequence in solution compete for binding of the limited number of target molecules. The plate is washed to remove excess target that has not been bound by the coated amino acid sequence and to also remove the second, solution phase amino acid sequence as well as any complexes formed between the second, solution phase amino acid sequence and target. The amount of bound target is then measured using a reagent that is appropriate to detect the target. An amino acid sequence in solution that is able to cross-block the coated amino acid sequence will be able to cause a decrease in the number of target molecules that the coated amino acid sequence can bind relative to the number of target molecules that the coated amino acid sequence can bind in the absence of the second, solution phase, amino acid sequence. In the instance where the first amino acid sequence, e.g. an Ab-X, is chosen to be the immobilized amino acid sequence, it is coated onto the wells of the ELISA plate, after which the plates are blocked with a suitable blocking solution to minimize non-specific binding of reagents that are subsequently added. An excess amount of the second amino acid sequence, i.e. Ab-Y, is then added to the ELISA plate such that the moles of Ab-Y target binding sites per well are at least 10 fold higher than the moles of Ab-X target binding sites that were used, per well, during the coating of the ELISA plate. Target is then added such that the moles of target added per well are at least 25-fold lower than the moles of Ab-X target binding sites that were used for coating each well. Following a suitable incubation period the ELISA plate is washed and a reagent for detecting the target is added to measure the amount of target specifically bound by the coated anti[target amino acid sequence (in this case Ab-X). The background signal for the assay is defined as the signal obtained in wells with the coated amino acid sequence (in this case Ab-X), second solution phase amino acid sequence (in this case Ab-Y), target buffer only (i.e. without target) and target detection reagents. The positive control signal for the assay is defined as the signal obtained in wells with the coated amino acid sequence (in this case Ab-X), second solution phase amino acid sequence buffer only (i.e. without second solution phase amino acid sequence), target and target detection reagents. The ELISA assay may be run in such a manner so as to have the positive control signal be at least 6 times the background signal. To avoid any artifacts (e.g. significantly different affinities between Ab-X and Ab-Y for the target) resulting from the choice of which amino acid sequence to use as the coating amino acid sequence and which to use as the second (competitor) amino acid sequence, the cross-blocking assay may to be run in two formats: 1) format 1 is where Ab-X is the amino acid sequence that is coated onto the ELISA plate and Ab-Y is the competitor amino acid sequence that is in solution and 2) format 2 is where Ab-Y is the amino acid sequence that is coated onto the ELISA plate and Ab-X is the competitor amino acid sequence that is in solution. Ab-X and Ab-Y are defined as cross-blocking if, either in format 1 or in format 2, the solution phase anti-target amino acid sequence is able to cause a reduction of between 60% and 100%, specifically between 70% and 100%, and more specifically between 80% and 100%, of the target detection signal {i.e. the amount of target bound by the coated amino acid sequence) as compared to the target detection signal obtained in the absence of the solution phase anti-target amino acid sequence (i.e. the positive control wells).
[0214] t) An amino acid sequence is said to be “cross-reactive” for two different antigens or antigenic determinants (such as serum albumin from two different species of mammal, such as human serum albumin and cyno serum albumin) if it is specific for (as defined herein) both these different antigens or antigenic determinants.
[0215] u) By binding that is “essentially independent of the pH” is generally meant herein that the association constant (K_{A}) of the amino acid sequence with respect to the serum protein (such as serum albumin) at the pH value(s) that occur in a cell of an animal or human body (as further described herein) is at least 5%, such as at least 10%, preferably at least 25%, more preferably at least 50%, even more preferably at least 60%, such as even more preferably at least 70%, such as at least 80% or 90% or more (or even more than 100%, such as more than 110%, more than 120% or even 130% or more, or even more than 150%, or even more than 200%) of the association constant (K_{A}) of the amino acid sequence with respect to the same serum protein at the pH value(s) that occur outside said cell. Alternatively, by binding that is “essentially independent of the pH” is generally meant herein that the k_{off} rate (measured by Biacore) of the amino acid sequence with respect to the serum protein (such as serum albumin) at the pH value(s) that occur in a cell of an animal or human body (as e.g. further described herein, e.g. pH around 5.5, e.g. 5.3 to 5.7) is at least 5%, such as at least 10%, preferably at least 25%, more preferably at least 50%, even more preferably at least 60%, such as even more preferably at least 70%, such as at least 80% or 90% or more (or even more than 100%, such as more than 110%, more than 120% or even 130% or more, or even more than 150%, or even more than 200%) of the k_{off} rate of the amino acid sequence with respect to the same serum protein at the pH value(s) that occur outside said cell, e.g. pH 7.2 to 7.4. By “the pH value(s) that occur in a cell of an animal or human body” is meant the pH value(s) that may occur inside a cell, and in particular inside a cell that is involved in the recycling of the serum protein. In particular, by “the pH value(s) that occur in a cell of an animal or human body” is meant the pH value(s) that may occur inside a (sub)cellular compartment or vesicle that is involved in recycling of the serum protein (e.g. as a result of pinocytosis, endocytosis, transcytosis, exocytosis and phagocytosis or a similar mechanism of uptake or internalization into said cell), such as an endosome, lysosome or pinosome.
[0216] v) As further described herein, the total number of amino acid residues in a Nanobody can be in the region of 110-120, is preferably 112-115, and is most preferably 113. It should however be noted that parts, fragments, analogs or derivatives (as further described herein) of a Nanobody are not particularly limited as to their length and/or size, as long as such parts, fragments, analogs or derivatives meet the further requirements outlined herein and are also preferably suitable for the purposes described herein;
[0217] w) As further described in paragraph q) on pages 58 and 59 of WO 08/020,079 (incorporated herein by reference), the amino acid residues of a Nanobody are numbered according to the general numbering for V_{H} domains given by Kabat et al. (“Sequence of proteins of immunological interest”, US Public Health Services, NIH Bethesda, Md., Publication No. 91), as applied to V_{HH} domains from Camelids in the article of Riechmann and Muyldermans, J. Immunol. Methods 2000 Jun. 23; 240 (1-2): 185-195 (see for example FIG. 2 of this publication), and accordingly FR1 of a Nanobody comprises the amino acid residues at positions 1-30, CDR1 of a Nanobody comprises the amino acid residues at positions 31-35, FR2 of a Nanobody comprises the amino acids at positions 36-49, CDR2 of a Nanobody comprises the amino acid residues at positions 50-65, FR3 of a Nanobody comprises the amino acid residues at positions 66-94, CDR3 of a Nanobody comprises the amino acid residues at positions 95-102, and FR4 of a Nanobody comprises the amino acid residues at positions 103-113.
[0218] x) The Figures, Sequence Listing and the Experimental Part/Examples are only given to further illustrate the invention and should not be interpreted or construed as limiting the scope of the invention and/or of the appended claims in any way, unless explicitly indicated otherwise herein.

[0219] The present invention provides amino acid sequences and polypeptides (also referred to as “polypeptides of the invention”) that are capable of binding to two or more different antigenic determinants, epitopes, parts, domains of IL-6R. In this context, the amino acid sequences and polypeptides of the invention are also referred to as “multiparatopic” (such as e.g. “biparatopic” or “triparatopic”, etc.) amino acid sequences and polypeptides. The multiparatopic amino acid sequences and polypeptides of the invention can be directed against any antigenic determinants, epitopes, parts, and/or domains of IL-6R. For example, and generally, a biparatopic polypeptide of the invention may comprise at least one amino acid sequence and/or Nanobody directed against a first antigenic determinant, epitope, part or domain of IL-6R and at least one amino acid sequence and/or Nanobody directed against a second antigenic determinant, epitope, part or domain of IL-6R different from the first antigenic determinant, epitope, part or domain (in which said amino acid sequences and/or Nanobody may be suitably linked, for example via a suitable linker as further described herein). Preferably, such a biparatopic polypeptide of the invention is further such that, when it binds to IL-6R, it is capable of simultaneously binding to the first antigenic determinant, epitope, part or domain (i.e. via the at least one amino acid sequence and/or Nanobody of the invention capable of binding to said first antigenic determinant, epitope, part or domain) and binding to said second antigenic determinant, epitope, part or domain (i.e. via the at least one amino acid sequence and/or Nanobody of the invention capable of binding to said second antigenic determinant, epitope, part or domain). Examples of such biparatopic polypeptides of the invention will become clear from the further description herein. Also, a triparatopic polypeptide of the invention may comprise at least one further amino acid sequence and/or Nanobody of the invention directed against a third antigenic determinant, epitope, part or domain of IL-6R (different from both the first and second antigenic determinant, epitope, part or domain), and generally multiparatopic polypeptides of the invention may contain at least two amino acid sequences and/or Nanobodies of the invention directed against at least two different antigenic determinants, epitopes, parts or domains of IL-6R. Generally, such biparatopic, triparatopic and multiparatopic polypeptides of the invention may be as further described herein, and the various preferred aspects of the invention as described herein also apply to these biparatopic, triparatopic and multiparatopic polypeptides of the invention (for example, these biparatopic, triparatopic and multiparatopic polypeptides of the invention preferably comprise single variable domains and more preferably Nanobodies).

[0220] Preferably, the epitopes bound by the amino acid sequences and/or Nanobodies comprised in the biparatopic (or multiparatopic) polypeptides of the invention are extracellular epitopes. Some specific epitopes to which the amino acid sequences and/or Nanobodies and polypeptides of the invention may preferably bind will become clear from the further description herein.

[0221] In a preferred, but non-limiting aspect, the biparatopic (or multiparatopic) polypeptides of the invention are directed against an epitope that lies in, forms part of, or overlaps with (i.e. in the primary or tertiary structure) or is in close proximity to (i.e. in the primary or tertiary structure) the IL-6 binding site on IL-6R (for example, competitively with IL-6) and/or are capable of competing with IL-6 for binding to IL-6R, as well as against at least one other antigenic determinant, epitope, part or domain on ft-6R. Generally, such a biparatopic (or multiparatopic) polypeptide of the invention will contain at least one amino acid sequence and/or Nanobody that is capable of binding an epitope that lies in, forms part of, or overlaps with (i.e. in the primary or tertiary structure) or is in close proximity to (i.e. in the primary or tertiary structure) the IL-6 binding site on IL-6R (for example, competitively with IL-6), and/or capable of competing with IL-6 for binding to IL-6R, as well as at least one further amino acid sequence and/or Nanobody that is capable of binding to at least one other antigenic determinant, epitope, part or domain on IL-6R. Generally, such biparatopic (or multiparatopic) polypeptides of the invention may be as further described herein, and the various preferred aspects of the invention as described herein also apply to these biparatopic (or multiparatopic) polypeptides of the invention (for example, these biparatopic and multiparatopic polypeptides of the invention may comprise suitable linkers; are preferably such that they can simultaneously bind the IL-6 binding site and the at least one other antigenic determinant, epitope, part or domain on IL-6R; and preferably comprise single variable domains and more preferably Nanobodies).

[0222] In another preferred, but non-limiting aspect, the biparatopic (or multiparatopic) polypeptides of the invention are directed against one or more of the 18 contact residues as described in Boulanger et al. 2003 (Science 300: 2101-2104) present in the extracellular D3 domain of the IL-6R, more preferably amino acid residues Phe229 and Phe279 present in the extracellular D3 domain of the IL-6R), as well as against at least one other antigenic determinant, epitope, part or domain on IL-6R. Generally, such a biparatopic (or multiparatopic) polypeptide of the invention will contain at least one amino acid sequence and/or Nanobody that is capable of binding one or more of the 18 contact residues as described in Boulanger et al. 2003 (Science 300: 2101-2104) present in the extracellular D3 domain of the IL-6R, more preferably amino acid residues Phe229 and Phe279 present in the extracellular D3 domain of the IL-6R), as well as at least one further amino acid sequence and/or Nanobody that is capable of binding to at least one other antigenic determinant, epitope, part or domain on IL-6R. Generally, such biparatopic (or multiparatopic) polypeptides of the invention may be as further described herein, and the various preferred aspects of the invention as described herein also apply to these biparatopic (or multiparatopic) polypeptides of the invention (for example, these biparatopic and multiparatopic polypeptides of the invention may comprise suitable linkers; are preferably such that they can simultaneously bind the one or more of the 18 contact residues as described in Boulanger et al. 2003 (Science 300: 2101-2104) present in the extracellular D3 domain of the IL-6R, more preferably amino acid residues Phe229 and Phe279 present in the extracellular D3 domain of the IL-6R) and the at least one other antigenic determinant, epitope, part or domain on IL-6R; and preferably comprise single variable domains and more preferably Nanobodies).

[0223] In another preferred, but non-limiting aspect, the biparatopic (or multiparatopic) polypeptides of the invention are directed against amino acid residues Phe229 and Phe279 present in the extracellular D3 domain of the IL-6R, as well as against at least one other antigenic determinant, epitope, part or domain on IL-6R. Generally, such a biparatopic (or multiparatopic) polypeptide of the invention will contain at least one amino acid sequence and/or Nanobody that is capable of binding amino acid residues Phe229 and Phe279 present in the extracellular D3 domain of the IL-6R, as well as at least one further amino acid sequence and/or Nanobody that is capable of binding to at least one other antigenic determinant, epitope, part or domain on IL-6R. Generally, such biparatopic (or multiparatopic) polypeptides of the invention may be as further described herein, and the various preferred aspects of the invention as described herein also apply to these biparatopic (or multiparatopic) polypeptides of the invention (for example, these biparatopic and multiparatopic polypeptides of the invention may comprise suitable linkers; are preferably such that they can simultaneously bind the amino acid residues Phe229 and Phe279 present in the extracellular D3 domain of the IL-6R and the at least one other antigenic determinant, epitope, part or domain on IL-6R; and preferably comprise single variable domains and more preferably Nanobodies).

[0224] In another preferred, but non-limiting aspect, the biparatopic (or multiparatopic) polypeptides of the invention are at least capable, upon binding to IL-6R, (i) to modulate, and in particular inhibit and/or prevent, binding of IL-6R to IL-6 and/or binding of the IL-6/IL-6R complex to gp130 and thus (ii) to modulate, and in particular inhibit or prevent, the signalling that is mediated by IL-6, IL-6R, IL-6/IL-BR complex and/or gp130, (iii) to modulate the biological pathways in which IL-6, IL-6R, the IL6/IL-6R complex and/or gp130 are involved, and/or (iv) to modulate the biological mechanisms, responses and effects associated with such signalling or these pathways.

[0225] Such biparatopic (or multiparatopic) polypeptides of the invention preferably comprise at least one amino acid sequence and/or Nanobody that is capable, upon binding to IL-6R, (i) to modulate, and in particular inhibit and/or prevent, binding of IL-6R to IL-6 and thus (ii) to modulate, and in particular inhibit or prevent, the signalling that is mediated by IL-6, IL-6R, IL-6/IL-6R complex and/or gp130, (iii) to modulate the biological pathways in which IL-6, IL-6R, the IL6/IL-6R complex and/or gp130 are involved, and/or (iv) to modulate the biological mechanisms, responses and effects associated with such signalling or these pathways; as well as at least one further amino acid sequence and/or Nanobody that is capable of binding to at least one other antigenic determinant, epitope, part or domain on IL-6R (i.e. different from the antigenic determinant, epitope, part or domain to which the aforementioned amino acid sequence and/or Nanobody can bind). Such biparatopic (or multiparatopic) polypeptides of the invention preferably comprise at least one amino acid sequence and/or Nanobody that is directed against an epitope that lies in, forms part of, or overlaps with (i.e. in the primary or tertiary structure) or is in close proximity to (i.e. in the primary or tertiary structure) to the IL-6 binding site on IL-6R (preferably, one or more of the 18 contact residues as described in Boulanger et al. 2003 (Science 300: 2101-2104) present in the extracellular D3 domain of the IL-6R, more preferably amino acid residues Phe229 and Phe279 present in the extracellular D3 domain of the IL-6R; for example, competitively with IL-6) and/or are capable of competing with IL-6 for binding to IL-6R, as well as at least one further amino acid sequence and/or Nanobody that is capable of binding to at least one other antigenic determinant, epitope, part or domain on IL-6R. Generally, such biparatopic (or multiparatopic) polypeptides of the invention may be as further described herein, and the various preferred aspects of the invention as described herein also apply to these biparatopic (or multiparatopic) polypeptides of the invention (for example, these biparatopic and multiparatopic polypeptides of the invention may comprise suitable linkers; are preferably such that they can simultaneously bind the IL-6 binding site and the at least one other antigenic determinant, epitope, part or domain on IL-6R; and preferably comprise single variable domains and more preferably Nanobodies).

[0226] In another preferred, but non-limiting aspect, the biparatopic (or multiparatopic) polypeptides of the invention are directed against an epitope that lies in, forms part of, or overlaps with (i.e. in the primary or tertiary structure) or is in close proximity to (i.e. in the primary or tertiary structure) the gp130 binding site on IL-6R and/or the IL-6/IL-6R complex (for example, competitively with gp130); and/or are capable of competing with gp130 for binding to IL-6R and/or the IL-6/IL-6R complex, as well as against at least one other antigenic determinant, epitope, part or domain on IL-6R. Generally, such a biparatopic (or multiparatopic) polypeptide of the invention will contain at least one amino acid sequence and/or Nanobody that is capable of binding an epitope that lies in, forms part of, or overlaps with (i.e. in the primary or tertiary structure) or is in close proximity to (i.e. in the primary or tertiary structure) the gp130 binding site on IL-6R and/or the IL-6/IL-6R complex (for example, competitively with gp130), and/or that is capable of competing with gp130 for binding to the IL-6/IL-6R complex, as well as at least one further amino acid sequence and/or Nanobody that is capable of binding to at least one other antigenic determinant, epitope, part or domain on IL-6R. Generally, such biparatopic (or multiparatopic) polypeptides of the invention may be as further described herein, and the various preferred aspects of the invention as described herein also apply to these biparatopic (or multiparatopic) polypeptides of the invention (for example, these biparatopic and multiparatopic polypeptides of the invention may comprise suitable linkers; are preferably such that they can simultaneously bind the gp130 binding site on IL-6R and/or the IL-6/IL-6R complex and the at least one other antigenic determinant, epitope, part or domain on IL-6R; and preferably comprise single variable domains and more preferably Nanobodies).

[0227] In another preferred, but non-limiting aspect, the biparatopic (or multiparatopic) polypeptides of the invention are at least capable, upon binding to IL-6R, (i) to modulate, and in particular inhibit and/or prevent, binding of the IL-6/IL-6R complex to gp130 and thus (ii) to modulate, and in particular inhibit or prevent, the signalling that is mediated by IL-6, IL-6R, IL-6/IL-6R complex and/or gp130, (iii) to modulate the biological pathways in which IL-6, IL-6R, the IL6/IL-6R complex and/or gp130 are involved, and/or (iv) to modulate the biological mechanisms, responses and effects associated with such signalling or these pathways.

[0228] Such biparatopic (or multiparatopic) polypeptides of the invention preferably comprise at least one amino acid sequence and/or Nanobody that is capable, upon binding to IL-6R, (i) to modulate, and in particular inhibit and/or prevent, binding of the IL-6/IL-6R complex to gp130 and thus (ii) to modulate, and in particular inhibit or prevent, the signalling that is mediated by IL-6, IL-6R, IL-6/IL-6R complex and/or gp130, (iii) to modulate the biological pathways in which IL-6, IL-6R, the IL6/IL-6R complex and/or gp130 are involved, and/or (iv) to modulate the biological mechanisms, responses and effects associated with such signalling or these pathways; as well as at least one further amino acid sequence and/or Nanobody that is capable of binding to at least one other antigenic determinant, epitope, part or domain on IL-6R (i.e. different from the antigenic determinant, epitope, part or domain to which the aforementioned amino acid sequence and/or Nanobody of the invention can bind). Such biparatopic (or multiparatopic) polypeptides of the invention preferably comprise at least one amino acid sequence and/or that is directed against an epitope that lies in, forms part of, or overlaps with (i.e. in the primary or tertiary structure) or is in close proximity to (i.e. in the primary or tertiary structure) to the gp130 binding site on IL-6R and/or the IL-6/Il-6R complex (for example, competitively with gp130) and/or are capable of competing with gp130 for binding the IL-6/IL-6R complex, as well as at least one further amino acid sequence and/or Nanobody that is capable of binding to at least one other antigenic determinant, epitope, part or domain on IL-6R. Generally, such biparatopic (or multiparatopic) polypeptides of the invention may be as further described herein, and the various preferred aspects of the invention as described herein also apply to these biparatopic (or multiparatopic) polypeptides of the invention (for example, these biparatopic and multiparatopic polypeptides of the invention may comprise suitable linkers; are preferably such that they can simultaneously bind the gp130 binding site on IL-6R and/or the IL-6/IL-6R complex and the at least one other antigenic determinant, epitope, part or domain on IL-6R; and preferably comprise single variable domains and more preferably Nanobodies).

[0229] In a preferred, but non-limiting aspect, the biparatopic (or multiparatopic) polypeptides of the invention are directed against an epitope that lies in, forms part of, or overlaps with (i.e. in the primary or tertiary structure) or is in close proximity to (i.e. in the primary or tertiary structure) the binding site of the reference IgG (as defined by SEQ. ID NO's: 126 and 127) and/or the reference Fab (as defined by SEQ ID NO's: 128 and 129) on IL-6R (for example, competitively with the reference IgG and/or the reference Fab) and/or are capable of competing with the reference IgG and/or the reference Fab for binding to IL-6R, as well as against at least one other antigenic determinant, epitope, part or domain on IL-6R. Generally, such a biparatopic (or multiparatopic) polypeptide of the invention will contain at least one amino acid sequence and/or Nanobody that is capable of binding an epitope that lies in, forms part of, or overlaps with (i.e. in the primary or tertiary structure) or is in close proximity to (i.e. in the primary or tertiary structure) the binding site of the reference IgG and/or the reference Fab on IL-6R (for example, competitively with the reference IgG and/or the reference Fab), and/or capable of competing with the reference IgG and/or the reference Fab for binding to IL-6R, as well as at least one further amino acid sequence and/or Nanobody that is capable of binding to at least one other antigenic determinant, epitope, part or domain on IL-6R. Generally, such biparatopic (or multiparatopic) polypeptides of the invention may be as further described herein, and the various preferred aspects of the invention as described herein also apply to these biparatopic (or multiparatopic) polypeptides of the invention (for example, these biparatopic and multiparatopic polypeptides of the invention may comprise suitable linkers; are preferably such that they can simultaneously bind the binding site of the reference IgG and/or the reference Fab on and the at least one other antigenic determinant, epitope, part or domain on IL-6R; and preferably comprise single variable domains and more preferably Nanobodies).

[0230] In another preferred, but non-limiting aspect, the biparatopic (or multiparatopic) polypeptides of the invention are at least capable, upon binding to IL-6R, (i) to modulate, and in particular inhibit and/or prevent, binding of IL-6R to IL-6 and/or binding of the IL-6/IL-6R complex to gp130 and thus (ii) to modulate, and in particular inhibit or prevent, the signalling that is mediated by IL-6, IL-6R, IL-6/IL-6R complex and/or gp130, (iii) to modulate the biological pathways in which IL-6, IL-6R, the IL6/IL-6R complex and/or gp130 are involved, and/or (iv) to modulate the biological mechanisms, responses and effects associated with such signalling or these pathways, or more generally capable of modulating (as defined herein) IL-6R or IL-6R mediated signalling via the same mechanism of action as the reference IgG and/or the reference Fab.

[0231] Such biparatopic (or multiparatopic) polypeptides of the invention preferably comprise at least one amino acid sequence and/or Nanobody that is capable, upon binding to IL-6R, (i) to modulate, and in particular inhibit and/or prevent, binding of IL-6R to IL-6 and thus (ii) to modulate, and in particular inhibit or prevent, the signalling that is mediated by IL-6, IL-6R, IL-6/IL-6R complex and/or gp130, (iii) to modulate the biological pathways in which IL-6, IL-6R, the IL6/IL-6R complex and/or gp130 are involved, and/or (iv) to modulate the biological mechanisms, responses and effects associated with such signalling or these pathways, or more generally capable of modulating (as defined herein) IL-6R or IL-6R mediated signalling via the same mechanism of action as the reference IgG and/or the reference Fab; as well as at least one further amino acid sequence and/or Nanobody that is capable of binding to at least one other antigenic determinant, epitope, part or domain on IL-6R (i.e. different from the antigenic determinant, epitope, part or domain to which the aforementioned amino acid sequence and/or Nanobody can bind). Such biparatopic (or multiparatopic) polypeptides of the invention preferably comprise at least one amino acid sequence and/or Nanobody that is directed against an epitope that lies in, forms part of, or overlaps with (i.e. in the primary or tertiary structure) or is in close proximity to (i.e. in the primary or tertiary structure) to the binding site of the reference IgG and/or the reference Fab on IL-6R (for example, competitively with the reference IgG and/or the reference Fab) and/or are capable of competing with the reference IgG and/or the reference Fab for binding to IL-6R, as well as at least one further amino acid sequence and/or Nanobody that is capable of binding to at least one other antigenic determinant, epitope, part or domain on IL-6R. Generally, such biparatopic (or multiparatopic) polypeptides of the invention may be as further described herein, and the various preferred aspects of the invention as described herein also apply to these biparatopic (or multiparatopic) polypeptides of the invention (for example, these biparatopic and multiparatopic polypeptides of the invention may comprise suitable linkers; are preferably such that they can simultaneously bind the binding site of the reference IgG and/or the reference Fab on IL-6R and the at least one other antigenic determinant, epitope, part or domain on IL-6R; and preferably comprise single variable domains and more preferably Nano bodies).

[0232] In a preferred, but non-limiting aspect, the biparatopic (or multiparatopic) polypeptides of the invention are directed against an epitope that lies in, forms part of, or overlaps with (i.e. in the primary or tertiary structure) or is in close proximity to (i.e. in the primary or tertiary structure) the Tocilizumab (MRA) binding site on IL-6R (for example, competitively with Tocilizumab (MRA)) and/or are capable of competing with Tocilizumab (MRA) for binding to IL-6R, as well as against at least one other antigenic determinant, epitope, part or domain on IL-6R. Generally, such a biparatopic (or multiparatopic) polypeptide of the invention will contain at least one amino acid sequence and/or Nanobody that is capable of binding an epitope that lies in, forms part of, or overlaps with (i.e. in the primary or tertiary structure) or is in close proximity to (i.e. in the primary or tertiary structure) the Tocilizumab (MRA) binding site on IL-6R (for example, competitively with Tocilizumab (MRA)), and/or capable of competing with Tocilizumab (MRA) for binding to IL-6R, as well as at least one further amino acid sequence and/or Nanobody that is capable of binding to at least one other antigenic determinant, epitope, part or domain on IL-6R. Generally, such biparatopic (or multiparatopic) polypeptides of the invention may be as further described herein, and the various preferred aspects of the invention as described herein also apply to these biparatopic (or multiparatopic) polypeptides of the invention (for example, these biparatopic and multiparatopic polypeptides of the invention may comprise suitable linkers; are preferably such that they can simultaneously bind the Tocilizumab (MRA) binding on IL-6R and the at least one other antigenic determinant, epitope, part or domain on IL-6R; and preferably comprise single variable domains and more preferably Nanobodies).

[0233] In another preferred, but non-limiting aspect, the biparatopic (or multiparatopic) polypeptides of the invention are at least capable, upon binding to IL-6R, (i) to modulate, and in particular inhibit and/or prevent, binding of IL-6R to IL-6 and/or binding of the IL-6/IL-6R complex to gp130 and thus (ii) to modulate, and in particular inhibit or prevent, the signalling that is mediated by IL-6, IL-6R, IL-6/IL-6R complex and/or gp130, (iii) to modulate the biological pathways in which IL-6, IL-6R, the IL-6/IL-6R complex and/or gp130 are involved, and/or (iv) to modulate the biological mechanisms, responses and effects associated with such signalling or these pathways, or more generally capable of modulating (as defined herein) IL-6R or IL-6R mediated signalling via the same mechanism of action as Tocilizumab (MRA).

[0234] Such biparatopic (or multiparatopic) polypeptides of the invention preferably comprise at least one amino acid sequence and/or Nanobody that is capable, upon binding to IL-6R, (i) to modulate, and in particular inhibit and/or prevent, binding of IL-6R to IL-6 and thus (ii) to modulate, and in particular inhibit or prevent, the signalling that is mediated by IL-6, IL-6R, IL-6/IL-6R complex and/or gp130, (iii) to modulate the biological pathways in which IL-6, IL-6R, the IL6/IL-6R complex and/or gp130 are involved, and/or (iv) to modulate the biological mechanisms, responses and effects associated with such signalling or these pathways, or more generally capable of modulating (as defined herein) IL-6R or IL-6R mediated signalling via the same mechanism of action as Tocilizumab (MRA); as well as at least one further amino acid sequence and/or Nanobody that is capable of binding to at least one other antigenic determinant, epitope, part or domain on IL-6R (i.e. different from the antigenic determinant, epitope, part or domain to which the aforementioned amino acid sequence and/or Nanobody can bind). Such biparatopic (or multiparatopic) polypeptides of the invention preferably comprise at least one amino acid sequence and/or Nanobody that is directed against an epitope that lies in, forms part of, or overlaps with (i.e. in the primary or tertiary structure) or is in close proximity to (i.e. in the primary or tertiary structure) to the Tocilizumab (MRA) binding site on IL-6R (for example, competitively with Tocilizumab (MRA)) and/or are capable of competing with Tocilizumab (MRA) for binding to IL-6R, as well as at least one further amino acid sequence and/or Nanobody that is capable of binding to at least one other antigenic determinant, epitope, part or domain on IL-6R. Generally, such biparatopic (or multiparatopic) polypeptides of the invention may be as further described herein, and the various preferred aspects of the invention as described herein also apply to these biparatopic (or multiparatopic) polypeptides of the invention (for example, these biparatopic and multiparatopic polypeptides of the invention may comprise suitable linkers; are preferably such that they can simultaneously bind the Tocilizumab (MRA) binding site on IL-6R and the at least one other antigenic determinant, epitope, part or domain on IL-6R; and preferably comprise single variable domains and more preferably Nanobodies).

[0235] In a preferred, but non-limiting aspect, the biparatopic (or multiparatopic) polypeptides of the invention are directed against an epitope that lies in, forms part of, or overlaps with (i.e. in the primary or tertiary structure) or is in close proximity to (i.e. in the primary or tertiary structure) the M182 binding site on IL-6R (for example, competitively with M182) and/or are capable of competing with M182 for binding to IL-6R, as well as against at least one other antigenic determinant, epitope, part or domain on IL-6R. Generally, such a biparatopic (or multiparatopic) polypeptide of the invention will contain at least one amino acid sequence and/or Nanobody that is capable of binding an epitope that lies in, forms part of, or overlaps with (i.e. in the primary or tertiary structure) or is in close proximity to (i.e. in the primary or tertiary structure) the M182 binding site on IL-6R (for example, competitively with M182), and/or capable of competing with M182 for binding to IL-6R, as well as at least one further amino acid sequence and/or Nanobody that is capable of binding to at least one other antigenic determinant, epitope, part or domain on IL-6R. Generally, such biparatopic (or multiparatopic) polypeptides of the invention may be as further described herein, and the various preferred aspects of the invention as described herein also apply to these biparatopic (or multiparatopic) polypeptides of the invention (for example, these biparatopic and multiparatopic polypeptides of the invention may comprise suitable linkers; are preferably such that they can simultaneously bind the M182 binding site on IL-6R and the at least one other antigenic determinant, epitope, part or domain on IL-6R; and preferably comprise single variable domains and more preferably Nanobodies).

[0236] In another preferred, but non-limiting aspect, the amino acid sequences and (in particular) polypeptides of the invention are biparatopic (or multiparatopic) and are at least capable, upon binding to IL-6R, (i) to modulate, and in particular inhibit and/or prevent, binding of the IL-6/IL-6R complex to gp130 and thus (ii) to modulate, and in particular inhibit or prevent, the signalling that is mediated by IL-6, IL-6R, IL-6/IL-6R complex and/or gp130, (iii) to modulate the biological pathways in which IL-6, IL-6R, the IL6/IL-6R complex and/or gp130 are involved, and/or (iv) to modulate the biological mechanisms, responses and effects associated with such signalling or these pathways, or more generally capable of modulating (as defined herein) IL-6R or IL-6R mediated signalling via the same mechanism of action as M182.

[0237] Such biparatopic (or multiparatopic) polypeptides of the invention preferably comprise at least one amino acid sequence and/or Nanobody that is capable, upon binding to IL-6R, (i) to modulate, and in particular inhibit and/or prevent, binding of the IL-6/IL-6R complex to gp130 and thus (ii) to modulate, and in particular inhibit or prevent, the signalling that is mediated by IL-6, IL-6R, IL-6/IL-6R complex and/or gp130, (iii) to modulate the biological pathways in which IL-6, IL-6R, the IL6/IL-6R complex and/or gp130 are involved, and/or (iv) to modulate the biological mechanisms, responses and effects associated with such signalling or these pathways, or more generally capable of modulating (as defined herein) IL-6R or IL-6R mediated signalling via the same mechanism of action as M182; as well as at least one further amino acid sequence and/or Nanobody that is capable of binding to at least one other antigenic determinant, epitope, part or domain on IL-6R (i.e. different from the antigenic determinant, epitope, part or domain to which the aforementioned amino acid sequence and/or Nanobody can bind). Such biparatopic (or multiparatopic) polypeptides of the invention preferably comprise at least one amino acid sequence and/or Nanobody that is directed against an epitope that lies in, forms part of, or overlaps with (i.e. in the primary or tertiary structure) or is in close proximity to (i.e. in the primary or tertiary structure) to the M182 binding site on IL-6R (for example, competitively with M182) and/or are capable of competing with M182 for binding to IL-6R, as well as at least one further amino acid sequence and/or Nanobody that is capable of binding to at least one other antigenic determinant, epitope, part or domain on IL-6R. Generally, such biparatopic (or multiparatopic) polypeptides of the invention may be as further described herein, and the various preferred aspects of the invention as described herein also apply to these biparatopic (or multiparatopic) polypeptides of the invention (for example, these biparatopic and multiparatopic polypeptides of the invention may comprise suitable linkers; are preferably such that they can simultaneously bind the M182 binding site on IL-6R and the at least one other antigenic determinant, epitope, part or domain on IL-6R; and preferably comprise single variable domains and more preferably Nanobodies).

[0238] In a preferred, but non-limiting aspect, the biparatopic (or multiparatopic) polypeptides of the invention are directed against an epitope that lies in, forms part of, or overlaps with (i.e. in the primary or tertiary structure) or is in close proximity to (i.e. in the primary or tertiary structure) the BN-12 binding site on IL-6R (for example, competitively with BN-12) and/or are capable of competing with BN-12 for binding to IL-6R, as well as against at least one other antigenic determinant, epitope, part or domain on IL-6R. Generally, such a biparatopic (or multiparatopic) polypeptide of the invention will contain at least one amino acid sequence and/or Nanobody that is capable of binding an epitope that lies in, forms part of, or overlaps with (i.e. in the primary or tertiary structure) or is in close proximity to (i.e. in the primary or tertiary structure) the BN-12 binding site on IL-6R (for example, competitively with M182), and/or capable of competing with BN-12 for binding to IL-6R, as well as at least one further amino acid sequence and/or Nanobody that is capable of binding to at least one other antigenic determinant, epitope, part or domain on IL-6R. Generally, such biparatopic (or multiparatopic) polypeptides of the invention may be as further described herein, and the various preferred aspects of the invention as described herein also apply to these biparatopic (or multiparatopic) polypeptides of the invention (for example, these biparatopic and multiparatopic polypeptides of the invention may comprise suitable linkers; are preferably such that they can simultaneously bind the BN-12 binding site on IL-6R and the at least one other antigenic determinant, epitope, part or domain on IL-6R; and preferably comprise single variable domains and more preferably Nanobodies).

[0239] In another preferred, but non-limiting aspect, the biparatopic (or multiparatopic) polypeptides of the invention are at least capable, upon binding to IL-6R, (i) to modulate, and in particular inhibit and/or prevent binding of IL-6R to IL-6 and/or binding of the IL-6/IL-6R complex to gp130 and thus (ii) to modulate, and in particular inhibit or prevent, the signalling that is mediated by IL-6, IL-6R, IL-6/IL-6R complex and/or gp130, (iii) to modulate the biological pathways in which IL-6, IL-6R, the IL6/IL-6R complex and/or gp130 are involved, and/or (iv) to modulate the biological mechanisms, responses and effects associated with such signalling or these pathways.

[0240] Such biparatopic (or multiparatopic) polypeptides of the invention preferably comprise at least one amino acid sequence and/or Nanobody that is capable, upon binding to IL-6R, (i) to modulate, and in particular inhibit and/or prevent binding of IL-6R to IL-6 and/or binding of the IL-6/IL-6R complex to gp130 and thus (ii) to modulate, and in particular inhibit or prevent, the signalling that is mediated by IL-6, IL-6R, IL-6/IL-6R complex and/or gp130, (iii) to modulate the biological pathways in which IL-6, IL-6R, the IL6/IL-6R complex and/or gp130 are involved, and/or (iv) to modulate the biological mechanisms, responses and effects associated with such signalling or these pathways; as well as at least one further amino acid sequence and/or Nanobody that is capable of binding to at least one other antigenic determinant, epitope, part or domain on IL-6R (i.e. different from the antigenic determinant, epitope, part or domain to which the aforementioned amino acid sequence and/or Nanobody can bind). Such biparatopic (or multiparatopic) polypeptides of the invention preferably comprise at least one amino acid sequence and/or Nanobody that is directed against an epitope that lies in, forms part of, or overlaps with (i.e. in the primary or tertiary structure) or is in close proximity to (i.e. in the primary or tertiary structure) to the BN-12 binding site on IL-6R (for example, competitively with BN-12) and/or is capable of competing with BN-12 for binding to IL-6R, as well as at least one further amino acid sequence and/or Nanobody that is capable of binding to at least one other antigenic determinant, epitope, part or domain on IL-6R. Generally, such biparatopic (or multiparatopic) polypeptides of the invention may be as further described herein, and the various preferred aspects of the invention as described herein also apply to these biparatopic (or multiparatopic) polypeptides of the invention (for example, these biparatopic and multiparatopic polypeptides of the invention may comprise suitable linkers; are preferably such that they can simultaneously bind the BN-12 binding site on IL-6R and the at least one other antigenic determinant, epitope, part or domain on IL-6R; and preferably comprise single variable domains and more preferably Nanobodies).

[0241] The at least one further amino acid sequence and/or Nanobody that is capable of binding to at least one other antigenic determinant, epitope, part or domain on IL-6R may be any amino acid sequence and/or Nanobody that is directed against and/or capable of binding IL-6R.

[0242] In a preferred but non-limiting aspect, the at least one further amino acid sequence and/or Nanobody that is capable of binding to at least one other antigenic determinant or epitope, part or domain on IL-6R binds an eptiope present in the extracellular D1 domain; and/or said at least one further amino acid sequence and/or Nanobody will recognize and/or specifically bind IL-6R while not binding the hybrid IL-6R (as described in Example 3; SEQ ID NO: 131). Accordingly, in a preferred but non-limiting aspect, the biparatopic (or multiparatopic) polypeptides of the invention may also be directed against an epitope that lies in, forms part of, or overlaps with (i.e. in the primary or tertiary structure) or is in close proximity to (i.e. in the primary or tertiary structure) the D1 domain of IL-6R and/or may be capable of specifically binding IL-6R while not binding the hybrid IL-6R (as described in Example 3; SEQ ID NO: 131).

[0243] In another preferred but non-limiting aspect, the at least one further amino acid sequence and/or Nanobody that is capable of binding to at least one other antigenic determinant, epitope, part or domain on IL-6R binds an eptiope present in the extracellular D2 domain; and/or said at least one further amino acid sequence and/or Nanobody will recognize and/or specifically bind IL-6R as well as the hybrid IL-6R (as described in Example 3; SEQ ID NO: 131). Accordingly, in a preferred but non-limiting aspect, the biparatopic (or multiparatopic) polypeptides of the invention may also be directed against an epitope that lies in, forms part of, or overlaps with (i.e. in the primary or tertiary structure) or is in close proximity to (i.e. in the primary or tertiary structure) the D2 domain of IL-6R and/or may be capable of specifically binding IL-6R as well as the hybrid IL-6R (as described in Example 3; SEQ ID NO: 131),

[0244] In another preferred but non-limiting aspect, the at least one further amino acid sequence and/or Nanobody that is capable of binding to at least one other antigenic determinant, epitope, part or domain on IL-6R binds an eptiope present in the extracellular D3 domain; and/or said at least one further amino acid sequence and/or Nanobody will recognize and/or specifically bind IL-6R as well as the hybrid IL-6R (as described in Example 3; SEQ ID NO: 131). Accordingly, in a preferred but non-limiting aspect, the biparatopic (or multiparatopic) polypeptides of the invention may also be directed against an epitope that lies in, forms part of, or overlaps with (i.e. in the primary or tertiary structure) or is in close proximity to (i.e. in the primary or tertiary structure) the D3 domain of IL-6R and/or may be capable of specifically binding IL-6R as well as the hybrid IL-6R (as described in Example 3; SEQ ID NO: 131).

[0245] Accordingly, in another preferred, but non-limiting aspect, the biparatopic (or multiparatopic) polypeptides of the invention may be directed against an epitope that lies in, forms part of, or overlaps with (i.e. in the primary or tertiary structure) or is in close proximity to (i.e. in the primary or tertiary structure) the IL-6 binding site on IL-6R ((preferably, one or more of the 18 contact residues as described in Boulanger et al. 2003 (Science 300, 2101-2104) present in the extracellular D3 domain of the IL-6R, more preferably amino acid residues Phe229 and Phe279 present in the extracellular D3 domain of the IL-6R; for example, competitively with IL-6) and/or are capable of competing with IL-6 for binding to IL-6R, as well as against at least one other antigenic determinant or epitope on IL-6R that lies in, forms part of, or overlaps with (i.e. in the primary or tertiary structure) or is in close proximity to (i.e. in the primary or tertiary structure) the D1 domain of IL-6R; and/or may be capable of specifically binding IL-6R while not binding the hybrid IL-6R (as described in Example 3; SEQ ID NO: 131). Generally, such a biparatopic (or multiparatopic) polypeptide of the invention will contain at least one amino acid sequence and/or Nanobody that is capable of binding an epitope that lies in, forms part of, or overlaps with (i.e. in the primary or tertiary structure) or is in close proximity to (i.e. in the primary or tertiary structure) the IL-6 binding site on IL-6R ((preferably, one or more of the 18 contact residues as described in Boulanger et al. 2003 (Science 300, 2101-2104) present in the extracellular D3 domain of the IL-6R, more preferably amino acid residues Phe229 and Phe279 present in the extracellular D3 domain of the 1′-6R; for example, competitively with IL-6), and/or capable of competing with IL-6 for binding to IL-6R, as well as at least one further amino acid sequence and/or Nanobody that is capable of binding to at least one other antigenic determinant or epitope on IL-6R that lies in, forms part of, or overlaps with (i.e. in the primary or tertiary structure) or is in close proximity to (i.e. in the primary or tertiary structure) the D1 domain of IL-6R and/or may be capable of specifically binding IL-6R while not binding the hybrid IL-6R (as described in Example 3; SEQ ID NO: 131). Generally, such biparatopic for multiparatopic) polypeptides of the invention may be as further described herein, and the various preferred aspects of the invention as described herein also apply to these biparatopic (or multiparatopic) polypeptides of the invention (for example, these biparatopic and multiparatopic polypeptides of the invention may comprise suitable linkers; are preferably such that they can simultaneously bind the IL-6 binding site and the at least one other antigenic determinant or epitope in the D1 domain on IL-6R; and preferably comprise single variable domains and more preferably Nanobodies).

[0246] Accordingly, in another preferred, but non-limiting aspect, the biparatopic (or multiparatopic) polypeptides of the invention may be directed against an epitope that lies in, forms part of, or overlaps with (i.e. in the primary or tertiary structure) or is in close proximity to (i.e. in the primary or tertiary structure) the IL-6 binding site on IL-6R ((preferably, one or more of the 18 contact residues as described in Boulanger et al. 2003 (Science 300, 2101-2104) present in the extracellular D3 domain of the IL-6R, more preferably amino acid residues Phe229 and Phe279 present in the extracellular D3 domain of the IL-6R; for example, competitively with IL-6) and/or are capable of competing with IL-6 for binding to IL-6R, as well as against at least one other antigenic determinant or epitope on IL-6R that lies in, forms part of, or overlaps with (i.e. in the primary or tertiary structure) or is in close proximity to (i.e. in the primary or tertiary structure) the D2 domain of IL-6R; and/or may be capable of specifically binding IL-6R as well as the hybrid IL-6R (as described in Example 3; SEQ ID NO: 131). Generally, such a biparatopic (or multiparatopic) polypeptide of the invention will contain at least one amino acid sequence and/or Nanobody that is capable of binding an epitope that lies in, forms part of, or overlaps with (i.e. in the primary or tertiary structure) or is in close proximity to (i.e. in the primary or tertiary structure) the IL-6 binding site on IL-6R ((preferably, one or more of the 18 contact residues as described in Boulanger et al. 2003 (Science 300, 2101-2104) present in the extracellular D3 domain of the IL-6R, more preferably amino acid residues Phe229 and Phe279 present in the extracellular D3 domain of the IL-6R; for example, competitively with IL-6), and/or capable of competing with IL-6 for binding to IL-6R, as well as at least one further amino acid sequence and/or Nanobody that is capable of binding to at least one other antigenic determinant or epitope on IL-6R that lies in, forms part of, or overlaps with (i.e. in the primary or tertiary structure) or is in close proximity to (i.e. in the primary or tertiary structure) the D2 domain of IL-6R and/or may be capable of specifically binding IL-6R as well as the hybrid IL-6R (as described in Example 3; SEQ ID NO: 131). Generally, such biparatopic (or multiparatopic) polypeptides of the invention may be as further described herein, and the various preferred aspects of the invention as described herein also apply to these biparatopic (or multiparatopic) polypeptides of the invention (for example, these biparatopic and multiparatopic polypeptides of the invention may comprise suitable linkers; are preferably such that they can simultaneously bind the IL-6 binding site and the at least one other antigenic determinant or epitope in the D2 domain on IL-6R; and preferably comprise single variable domains and more preferably Nanobodies).

[0247] Accordingly, in another preferred, but non-limiting aspect, the biparatopic (or multiparatopic) polypeptides of the invention may be directed against an epitope that lies in, forms part of, or overlaps with (i.e. in the primary or tertiary structure) or is in close proximity to (i.e. in the primary or tertiary structure) the IL-6 binding site on IL-6R ((preferably, one or more of the 18 contact residues as described in Boulanger et al. 2003 (Science 300, 2101-2104) present in the extracellular D3 domain of the IL-6R, more preferably amino acid residues Phe229 and Phe279 present in the extracellular D3 domain of the IL-6R; for example, competitively with IL-6) and/or are capable of competing with IL-6 for binding to IL-6R, as well as against at least one other antigenic determinant or epitope on IL-6R that lies in, forms part of, or overlaps with (i.e. in the primary or tertiary structure) or is in close proximity to (i.e. in the primary or tertiary structure) the D3 domain of IL-6R; and/or may be capable of specifically binding IL-6R as well as the hybrid IL-6R (as described in Example 3; SEQ ID NO: 131). Generally, such a biparatopic (or multiparatopic) polypeptide of the invention will contain at least one amino acid sequence and/or Nanobody that is capable of binding an epitope that lies in, forms part of, or overlaps with (i.e. in the primary or tertiary structure) or is in close proximity to (i.e. in the primary or tertiary structure) the IL-6 binding site on IL-6R ((preferably, one or more of the 18 contact residues as described in Boulanger et al. 2003 (Science 300, 2101-2104) present in the extracellular D3 domain of the IL-6R, more preferably amino acid residues Phe229 and Phe279 present in the extracellular D3 domain of the IL-6R; for example, competitively with IL-6), and/or capable of competing with IL-6 for binding to IL-6R, as well as at least one further amino acid sequence and/or Nanobody that is capable of binding to at least one other antigenic determinant or epitope on IL-6R that lies in, forms part of, or overlaps with (i.e. in the primary or tertiary structure) or is in close proximity to (i.e. in the primary or tertiary structure) the D3 domain of IL-6R and/or may be capable of specifically binding IL-6R as well as the hybrid IL-6R (as described in Example 3; SEQ ID NO: 131). Generally, such biparatopic (or multiparatopic) polypeptides of the invention may be as further described herein, and the various preferred aspects of the invention as described herein also apply to these biparatopic (or multiparatopic) polypeptides of the invention (for example, these biparatopic and multiparatopic polypeptides of the invention may comprise suitable linkers; are preferably such that they can simultaneously bind the IL-6 binding site and the at least one other antigenic determinant or epitope in the D3 domain on IL-6R; and preferably comprise single variable domains and more preferably Nanobodies).

[0248] In another preferred, but non-limiting aspect, the biparatopic (or multiparatopic) polypeptides of the invention are directed against an epitope that lies in, forms part of, or overlaps with (i.e. in the primary or tertiary structure) or is in close proximity to (i.e. in the primary or tertiary structure) the gp130 binding site on IL-6R and/or the IL-6/IL-6R complex (for example, competitively with gp130); and/or are capable of competing with gp130 for binding to IL-6R and/or the IL-6/IL-6R complex, as well as against at least one other antigenic determinant or epitope on IL-6R that lies in, forms part of, or overlaps with (i.e. in the primary or tertiary structure) or is in close proximity to (i.e. in the primary or tertiary structure) the D1 domain of IL-6R; and/or may be capable of specifically binding IL-6R while not binding the hybrid IL-6R (as described in Example 3; SEQ ID NO: 131). Generally, such a biparatopic (or multiparatopic) polypeptide of the invention will contain at least one amino acid sequence and/or Nanobody that is capable of binding an epitope that lies in, forms part of, or overlaps with (i.e. in the primary or tertiary structure) or is in close proximity to (i.e. in the primary or tertiary structure) the gp130 binding site on IL-6R and/or the IL-6/IL-6R complex (for example, competitively with gp130), and/or that is capable of competing with gp130 for binding to IL-6R and/or the IL-6/IL-6R complex, as well as at least one further amino acid sequence and/or Nanobody that is capable of binding to at least one other antigenic determinant or epitope on IL-6R that lies in, forms part of, or overlaps with (i.e. in the primary or tertiary structure) or is in close proximity to (i.e. in the primary or tertiary structure) the D1 domain of IL-6R; and/or may be capable of specifically binding IL-6R while not binding the hybrid IL-6R (as described in Example 3; SEQ ID NO: 131). Generally, such biparatopic (or multiparatopic) polypeptides of the invention may be as further described herein, and the various preferred aspects of the invention as described herein also apply to these biparatopic (or multiparatopic) polypeptides of the invention (for example, these biparatopic and multiparatopic polypeptides of the invention may comprise suitable linkers; are preferably such that they can simultaneously bind the gp130 binding site on IL-6R and/or the IL-6/IL-6R complex and the at least one other antigenic determinant or epitope in the D1 domain on IL-6R; and preferably comprise single variable domains and more preferably Nanobodies).

[0249] In another preferred, but non-limiting aspect, the biparatopic (or multiparatopic) polypeptides of the invention are directed against an epitope that lies in, forms part of, or overlaps with (i.e. in the primary or tertiary structure) or is in close proximity to (i.e. in the primary or tertiary structure) the gp130 binding site on IL-6R and/or the IL-6/IL-6R complex (for example, competitively with gp130); and/or are capable of competing with gp130 for binding to IL-6R and/or the IL-6/IL-6R complex, as well as against at least one other antigenic determinant or epitope on IL-6R that lies in, forms part of, or overlaps with (i.e. in the primary or tertiary structure) or is in close proximity to (i.e. in the primary or tertiary structure) the D2 domain of IL-6R; and/or may be capable of specifically binding IL-6R as well as the hybrid IL-6R (as described in Example 3; SEQ ID NO: 131). Generally, such a biparatopic (or multiparatopic) polypeptide of the invention will contain at least one amino acid sequence and/or Nanobody that is capable of binding an epitope that lies in, forms part of, or overlaps with (i.e. in the primary or tertiary structure) or is in close proximity to (i.e. in the primary or tertiary structure) the gp130 binding site on IL-6R and/or the IL-6/IL-6R complex (for example, competitively with gp130), and/or that is capable of competing with gp130 for binding to IL-6R and/or the IL-6/IL-6R complex, as well as at least one further amino acid sequence and/or Nanobody that is capable of binding to at least one other antigenic determinant or epitope on IL-6R that lies in, forms part of, or overlaps with (i.e. in the primary or tertiary structure) or is in close proximity to (i.e. in the primary or tertiary structure) the D2 domain of IL-6R; and/or may be capable of specifically binding IL-6R as well as the hybrid IL-6R (as described in Example 3; SEQ ID NO: 131). Generally, such biparatopic (or multiparatopic) polypeptides of the invention may be as further described herein, and the various preferred aspects of the invention as described herein also apply to these biparatopic (or multiparatopic) polypeptides of the invention (for example, these biparatopic and multiparatopic polypeptides of the invention may comprise suitable linkers; are preferably such that they can simultaneously bind the gp130 binding site on IL-6R and/or the IL-6/IL-6R complex and the at least one other antigenic determinant or epitope in the D2 domain on IL-6R; and preferably comprise single variable domains and more preferably Nanobodies).

[0250] In another preferred, but non-limiting aspect, the biparatopic (or multiparatopic) polypeptides of the invention are directed against an epitope that lies in, forms part of, or overlaps with (i.e. in the primary or tertiary structure) or is in close proximity to (i.e. in the primary or tertiary structure) the gp130 binding site on IL-6R and/or the IL-6/IL-6R complex (for example, competitively with gp130); and/or are capable of competing with gp130 for binding to IL-6R and/or the IL-6/IL-6R complex, as well as against at least one other antigenic determinant or epitope on IL-6R that lies in, forms part of, or overlaps with (i.e. in the primary or tertiary structure) or is in close proximity to (i.e. in the primary or tertiary structure) the D3 domain of IL-6R; and/or may be capable of specifically binding IL-6R as well as the hybrid IL-6R (as described in Example 3; SEQ ID NO: 131). Generally, such a biparatopic (or multiparatopic) polypeptide of the invention will contain at least one amino acid sequence and/or Nanobody that is capable of binding an epitope that lies in, forms part of, or overlaps with (i.e. in the primary or tertiary structure) or is in close proximity to (i.e. in the primary or tertiary structure) the gp130 binding site on IL-6R and/or the IL-6/IL-6R complex (for example, competitively with gp130), and/or that is capable of competing with gp130 for binding to IL-6R and/or the IL-6/IL-6R complex, as well as at least one further amino acid sequence and/or Nanobody that is capable of binding to at least one other antigenic determinant or epitope on IL-6R that lies in, forms part of, or overlaps with (i.e. in the primary or tertiary structure) or is in close proximity to (i.e. in the primary or tertiary structure) the D3 domain of IL-6R; and/or may be capable of specifically binding IL-6R as well as the hybrid IL-6R (as described in Example 3; SEQ ID NO: 131). Generally, such biparatopic (or multiparatopic) polypeptides of the invention may be as further described herein, and the various preferred aspects of the invention as described herein also apply to these biparatopic (or multiparatopic) polypeptides of the invention (for example, these biparatopic and multiparatopic polypeptides of the invention may comprise suitable linkers; are preferably such that they can simultaneously bind the gp130 binding site on IL-6R and/or the IL-6/IL-6R complex and the at least one other antigenic determinant or epitope in the D3 domain on IL-6R; and preferably comprise single variable domains and more preferably Nanobodies).

[0251] In a preferred, but non-limiting aspect, the biparatopic (or multiparatopic) polypeptides of the invention are directed against an epitope that lies in, forms part of, or overlaps with (i.e. in the primary or tertiary structure) or is in close proximity to (i.e. in the primary or tertiary structure) the binding site of the reference IgG (as defined by SEQ ID NO's: 126 and 127) and/or the reference Fab (as defined by SEQ ID NO's: 128 and 129) on IL-6R (for example, competitively with the reference IgG and/or the reference Fab) and/or are capable of competing with the reference IgG and/or the reference Fab for binding to IL-6R, as well as against at least one other antigenic determinant or epitope on IL-6R that lies in, forms part of, or overlaps with (i.e. in the primary or tertiary structure) or is in close proximity to (i.e. in the primary or tertiary structure) the D1 domain of IL-6R; and/or may be capable of specifically binding IL-6R while not binding the hybrid IL-6R (as described in Example 3; SEQ ID NO: 131). Generally, such a biparatopic (or multiparatopic) polypeptide of the invention will contain at least one amino acid sequence and/or Nanobody that is capable of binding an epitope that lies in, forms part of, or overlaps with (i.e. in the primary or tertiary structure) or is in close proximity to (i.e. in the primary or tertiary structure) the binding site of the reference IgG and/or the reference Fab on IL-6R (for example, competitively with the reference IgG and/or the reference Fab), and/or capable of competing with the reference IgG and/or the reference Fab for binding to IL-6R, as well as at least one further amino acid sequence and/or Nanobody that is capable of binding to at least one other antigenic determinant or epitope on IL-6R that lies in, forms part of, or overlaps with (i.e. in the primary or tertiary structure) or is in close proximity to (i.e. in the primary or tertiary structure) the D1 domain of IL-6R; and/or may be capable of specifically binding IL-6R while not binding the hybrid IL-6R (as described in Example 3; SEQ ID NO: 131). Generally, such biparatopic (or multiparatopic) polypeptides of the invention may be as further described herein, and the various preferred aspects of the invention as described herein also apply to these biparatopic (or multiparatopic) polypeptides of the invention (for example, these biparatopic and multiparatopic polypeptides of the invention may comprise suitable linkers; are preferably such that they can simultaneously bind the binding site of the reference IgG and/or the reference Fab on IL-6R and the at least one other antigenic determinant or epitope in the D1 domain on IL-6R; and preferably comprise single variable domains and more preferably Nanobodies).

[0252] In a preferred, but non-limiting aspect, the biparatopic (or multiparatopic) polypeptides of the invention are directed against an epitope that lies in, forms part of, or overlaps with (i.e. in the primary or tertiary structure) or is in close proximity to (i.e. in the primary or tertiary structure) the binding site of the reference IgG (as defined by SEQ ID NO's: 126 and 127) and/or the reference Fab (as defined by SEQ ID NO's: 128 and 129) on IL-6R (for example, competitively with the reference IgG and/or the reference Fab) and/or are capable of competing with the reference IgG and/or the reference Fab for binding to IL-6R, as well as against at least one other antigenic determinant or epitope on IL-6R that lies in, forms part of, or overlaps with (i.e. in the primary or tertiary structure) or is in close proximity to (i.e. in the primary or tertiary structure) the D2 domain of IL-6R; and/or may be capable of specifically binding IL-6R as will as the hybrid IL-6R (as described in Example 3; SEQ ID NO: 131). Generally, such a biparatopic (or multiparatopic) polypeptide of the invention will contain at least one amino acid sequence and/or Nanobody that is capable of binding an epitope that lies in, forms part of, or overlaps with (i.e. in the primary or tertiary structure) or is in close proximity to (i.e. in the primary or tertiary structure) the binding site of the reference IgG and/or the reference Fab on IL-6R (for example, competitively with the reference IgG and/or the reference Fab), and/or capable of competing with the reference IgG and/or the reference Fab for binding to IL-6R, as well as at least one further amino acid sequence and/or Nanobody that is capable of binding to at least one other antigenic determinant or epitope on IL-6R that lies in, forms part of, or overlaps with (i.e. in the primary or tertiary structure) or is in close proximity to (i.e. in the primary or tertiary structure) the D2 domain of IL-6R; and/or may be capable of specifically binding IL-6R as well as the hybrid IL-6R (as described in Example 3; SEQ ID NO: 131). Generally, such biparatopic (or multiparatopic) polypeptides of the invention may be as further described herein, and the various preferred aspects of the invention as described herein also apply to these biparatopic (or multiparatopic) polypeptides of the invention (for example, these biparatopic and multiparatopic polypeptides of the invention may comprise suitable linkers; are preferably such that they can simultaneously bind the binding site of the reference IgG and/or the reference Fab on IL-6R and the at least one other antigenic determinant or epitope in the D2 domain on IL-6R; and preferably comprise single variable domains and more preferably Nanobodies).

[0253] In a preferred, but non-limiting aspect, the biparatopic (or multiparatopic) polypeptides of the invention are directed against an epitope that lies in, forms part of, or overlaps with (i.e. in the primary or tertiary structure) or is in close proximity to (i.e. in the primary or tertiary structure) the binding site of the reference IgG (as defined by SEQ ID NO's: 126 and 127) and/or the reference Fab (as defined by SEQ ID NO's: 128 and 129) on IL-6R (for example, competitively with the reference IgG and/or the reference Fab) and/or are capable of competing with the reference IgG and/or the reference Fab for binding to IL-6R, as well as against at least one other antigenic determinant or epitope on IL-6R that lies in, forms part of, or overlaps with (i.e. in the primary or tertiary structure) or is in close proximity to (i.e. in the primary or tertiary structure) the D3 domain of IL-6R; and/or may be capable of specifically binding IL-6R as well as the hybrid IL-6R (as described in Example 3; SEQ ID NO: 131). Generally, such a biparatopic (or multiparatopic) polypeptide of the invention will contain at least one amino acid sequence and/or Nanobody that is capable of binding an epitope that lies in, forms part of, or overlaps with (i.e. in the primary or tertiary structure) or is in close proximity to (i.e. in the primary or tertiary structure) the binding site of the reference IgG and/or the reference Fab on IL-6R (for example, competitively with the reference IgG and/or the reference Fab), and/or capable of competing with the reference IgG and/or the reference Fab for binding to IL-6R, as well as at least one further amino acid sequence and/or Nanobody that is capable of binding to at least one other antigenic determinant or epitope on IL-6R that lies in, forms part of, or overlaps with (i.e. in the primary or tertiary structure) or is in close proximity to (i.e. in the primary or tertiary structure) the D3 domain of IL-6R; and/or may be capable of specifically binding IL-6R as well as the hybrid IL-6R (as described in Example 3; SEQ ID NO: 131). Generally, such biparatopic (or multiparatopic) polypeptides of the invention may be as further described herein, and the various preferred aspects of the invention as described herein also apply to these biparatopic (or multiparatopic) polypeptides of the invention (for example, these biparatopic and multiparatopic polypeptides of the invention may comprise suitable linkers; are preferably such that they can simultaneously bind the binding site of the reference IgG and/or the reference Fab on IL-6R and the at least one other antigenic determinant or epitope in the D3 domain on IL-6R; and preferably comprise single variable domains and more preferably Nano bodies).

[0254] In a preferred, but non-limiting aspect, the biparatopic (or multiparatopic) polypeptides of the invention are directed against an epitope that lies in, forms part of, or overlaps with (i.e. in the primary or tertiary structure) or is in close proximity to (i.e. in the primary or tertiary structure) the Tocilizumab (MRA) binding site on IL-6R (for example, competitively with Tocilizumab (MRA)) and/or are capable of competing with Tocilizumab (MRA) for binding to IL-6R, as well as against at least one other antigenic determinant or epitope on IL-6R that lies in, forms part of, or overlaps with (i.e. in the primary or tertiary structure) or is in close proximity to (i.e. in the primary or tertiary structure) the D1 domain of IL-6R; and/or may be capable of specifically binding IL-6R while not binding the hybrid IL-6R (as described in Example 3; SEQ ID NO: 131). Generally, such a biparatopic (or multiparatopic) polypeptide of the invention will contain at least one amino acid sequence and/or Nanobody that is capable of binding an epitope that lies in, forms part of, or overlaps with (i.e. in the primary or tertiary structure) or is in close proximity to (i.e. in the primary or tertiary structure) the Tocilizumab (MRA) binding site on IL-6R (for example, competitively with Tocilizumab (MRA)), and/or capable of competing with Tocilizumab (MRA) for binding to IL-6R, as well as at least one other antigenic determinant or epitope on IL-6R that lies in, forms part of, or overlaps with (i.e. in the primary or tertiary structure) or is in close proximity to (i.e. in the primary or tertiary structure) the D1 domain of IL-6R; and/or may be capable of specifically binding IL-6R while not binding the hybrid IL-6R (as described in Example 3; SEQ ID NO: 131). Generally, such biparatopic (or multiparatopic) polypeptides of the invention may be as further described herein, and the various preferred aspects of the invention as described herein also apply to these biparatopic (or multiparatopic) polypeptides of the invention (for example, these biparatopic and multiparatopic polypeptides of the invention may comprise suitable linkers; are preferably such that they can simultaneously bind the Tocilizumab (MRA) binding on IL-6R and the at least one other antigenic determinant or epitope in the D1 domain on IL-6R; and preferably comprise single variable domains and more preferably Nanobodies).

[0255] In a preferred, but non-limiting aspect, the biparatopic (or multiparatopic) polypeptides of the invention are directed against an epitope that lies in, forms part of, or overlaps with (i.e. in the primary or tertiary structure) or is in close proximity to (i.e. in the primary or tertiary structure) the Tocilizumab (MRA) binding site on IL-6R (for example, competitively with Tocilizumab (MRA)) and/or are capable of competing with Tocilizumab (MRA) for binding to IL-6R, as well as against at least one other antigenic determinant or epitope on IL-6R that lies in, forms part of, or overlaps with (i.e. in the primary or tertiary structure) or is in close proximity to (i.e. in the primary or tertiary structure) the D2 domain of IL-6R; and/or may be capable of specifically binding IL-6R as well as the hybrid IL-6R (as described in Example 3; SEQ ID NO: 131). Generally, such a biparatopic (or multiparatopic) polypeptide of the invention will contain at least one amino acid sequence and/or Nanobody that is capable of binding an epitope that lies in, forms part of, or overlaps with (i.e. in the primary or tertiary structure) or is in close proximity to (i.e. in the primary or tertiary structure) the Tocilizumab (MRA) binding site on IL-6R (for example, competitively with Tocilizumab (MRA)), and/or capable of competing with Tocilizumab (MRA) for binding to IL-6R, as well as at least one other antigenic determinant or epitope on IL-6R that lies in, forms part of, or overlaps with (i.e. in the primary or tertiary structure) or is in close proximity to (i.e. in the primary or tertiary structure) the D2 domain of IL-6R; and/or may be capable of specifically binding IL-6R as well as the hybrid IL-6R (as described in Example 3; SEQ ID NO: 131). Generally, such biparatopic (or multiparatopic) polypeptides of the invention may be as further described herein, and the various preferred aspects of the invention as described herein also apply to these biparatopic (or multiparatopic) polypeptides of the invention (for example, these biparatopic and multiparatopic polypeptides of the invention may comprise suitable linkers; are preferably such that they can simultaneously bind the Tocilizumab (MRA) binding on IL-6R and the at least one other antigenic determinant or epitope in the D2 domain on IL-6R; and preferably comprise single variable domains and more preferably Nanobodies).

[0256] In a preferred, but non-limiting aspect, the biparatopic (or multiparatopic) polypeptides of the invention are directed against an epitope that lies in, forms part of, or overlaps with (i.e. in the primary or tertiary structure) or is in close proximity to (i.e. in the primary or tertiary structure) the Tocilizumab (MRA) binding site on IL-6R (for example, competitively with Tocilizumab (MRA)) and/or are capable of competing with Tocilizumab (MRA) for binding to IL-6R, as well as against at least one other antigenic determinant or epitope on IL-6R that lies in, forms part of, or overlaps with (i.e. in the primary or tertiary structure) or is in close proximity to (i.e. in the primary or tertiary structure) the D3 domain of IL-6R; and/or may be capable of specifically binding IL-6R as well as the hybrid IL-6R (as described in Example 3; SEQ ID NO: 131). Generally, such a biparatopic (or multiparatopic) polypeptide of the invention will contain at least one amino acid sequence and/or Nanobody that is capable of binding an epitope that lies in, forms part of, or overlaps with (i.e. in the primary or tertiary structure) or is in close proximity to (i.e. in the primary or tertiary structure) the Tocilizumab (MRA) binding site on IL-6R (for example, competitively with Tocilizumab (MRA)), and/or capable of competing with Tocilizumab (MRA) for binding to IL-6R, as well as at least one other antigenic determinant or epitope on IL-6R that lies in, forms part of, or overlaps with (i.e. in the primary or tertiary structure) or is in close proximity to (i.e. in the primary or tertiary structure) the D3 domain of IL-6R; and/or may be capable of specifically binding IL-6R as well as the hybrid IL-6R (as described in Example 3; SEQ ID NO: 131). Generally, such biparatopic (or multiparatopic) polypeptides of the invention may be as further described herein, and the various preferred aspects of the invention as described herein also apply to these biparatopic (or multiparatopic) polypeptides of the invention (for example, these biparatopic and multiparatopic polypeptides of the invention may comprise suitable linkers; are preferably such that they can simultaneously bind the Tocilizumab (MRA) binding on IL-6R and the at least one other antigenic determinant or epitope in the D3 domain on IL-6R; and preferably comprise single variable domains and more preferably Nanobodies).

[0257] In a preferred, but non-limiting aspect, the biparatopic (or multiparatopic) polypeptides of the invention are directed against an epitope that lies in, forms part of, or overlaps with (i.e. in the primary or tertiary structure) or is in close proximity to (i.e. in the primary or tertiary structure) the M182 binding site on IL-6R (for example, competitively with M182) and/or are capable of competing with M182 for binding to IL-6R, as well as against at least one other antigenic determinant or epitope on IL-6R that lies in, forms part of, or overlaps with (i.e. in the primary or tertiary structure) or is in close proximity to (i.e. in the primary or tertiary structure) the D1 domain of IL-6R; and/or may be capable of specifically binding IL-6R while not binding the hybrid IL-6R (as described in Example 3; SEQ ID NO: 131). Generally, such a biparatopic (or multiparatopic) polypeptide of the invention will contain at least one amino acid sequence and/or Nanobody that is capable of binding an epitope that lies in, forms part of, or overlaps with (i.e. in the primary or tertiary structure) or is in close proximity to (i.e. in the primary or tertiary structure) the M182 binding site on IL-6R (for example, competitively with M182), and/or capable of competing with M182 for binding to IL-6R, as well as at least one further amino acid sequence and/or Nanobody that is capable of binding to at least one other antigenic determinant or epitope on IL-6R that lies in, forms part of, or overlaps with (i.e. in the primary or tertiary structure) or is in close proximity to (i.e. in the primary or tertiary structure) the D1 domain of IL-6R; and/or may be capable of specifically binding IL-6R while not binding the hybrid IL-6R (as described in Example 3; SEQ ID NO: 131). Generally, such biparatopic (or multiparatopic) polypeptides of the invention may be as further described herein, and the various preferred aspects of the invention as described herein also apply to these biparatopic (or multiparatopic) polypeptides of the invention (for example, these biparatopic and multiparatopic polypeptides of the invention may comprise suitable linkers; are preferably such that they can simultaneously bind the M182 binding site on IL-6R and the at least one other antigenic determinant or epitope in the D1 domain on IL-6R; and preferably comprise single variable domains and more preferably Nanobodies).

[0258] In a preferred, but non-limiting aspect, the biparatopic (or multiparatopic) polypeptides of the invention are directed against an epitope that lies in, forms part of, or overlaps with (i.e. in the primary or tertiary structure) or is in close proximity to (i.e. in the primary or tertiary structure) the M182 binding site on IL-6R (for example, competitively with M182) and/or are capable of competing with M182 for binding to IL-6R, as well as against at least one other antigenic determinant or epitope on IL-6R that lies in, forms part of, or overlaps with (i.e. in the primary or tertiary structure) or is in close proximity to (i.e. in the primary or tertiary structure) the D2 domain of IL-6R; and/or may be capable of specifically binding IL-6R as well as the hybrid IL-6R (as described in Example 3; SEQ ID NO: 131). Generally, such a biparatopic (or multiparatopic) polypeptide of the invention will contain at least one amino acid sequence and/or Nanobody that is capable of binding an epitope that lies in, forms part of, or overlaps with (i.e. in the primary or tertiary structure) or is in close proximity to (i.e. in the primary or tertiary structure) the M182 binding site on IL-6R (for example, competitively with M182), and/or capable of competing with M182 for binding to IL-6R, as well as at least one further amino acid sequence and/or Nanobody that is capable of binding to at least one other antigenic determinant or epitope on IL-6R that lies in, forms part of, or overlaps with (i.e. in the primary or tertiary structure) or is in close proximity to (i.e. in the primary or tertiary structure) the D2 domain of IL-6R; and/or may be capable of specifically binding IL-6R as well as the hybrid IL-6R (as described in Example 3; SEQ ID NO: 131). Generally, such biparatopic (or multiparatopic) polypeptides of the invention may be as further described herein, and the various preferred aspects of the invention as described herein also apply to these biparatopic (or multiparatopic) polypeptides of the invention (for example, these biparatopic and multiparatopic polypeptides of the invention may comprise suitable linkers; are preferably such that they can simultaneously bind the M182 binding site on IL-6R and the at least one other antigenic determinant or epitope in the D2 domain on IL-6R; and preferably comprise single variable domains and more preferably Nanobodies).

[0259] In a preferred, but non-limiting aspect, the biparatopic (or multiparatopic) polypeptides of the invention are directed against an epitope that lies in, forms part of, or overlaps with (i.e. in the primary or tertiary structure) or is in close proximity to (i.e. in the primary or tertiary structure) the M182 binding site on IL-6R (for example, competitively with M182) and/or are capable of competing with M182 for binding to IL-6R, as well as against at least one other antigenic determinant or epitope on IL-6R that lies in, farms part of, or overlaps with (i.e. in the primary or tertiary structure) or is in close proximity to (i.e. in the primary or tertiary structure) the D3 domain of IL-6R; and/or may be capable of specifically binding IL-6R as well as the hybrid IL-6R (as described in Example 3; SEQ ID NO: 131). Generally, such a biparatopic (or multiparatopic) polypeptide of the invention will contain at least one amino acid sequence and/or Nanobody that is capable of binding an epitope that lies in, forms part of, or overlaps with (i.e. in the primary or tertiary structure) or is in close proximity to (i.e. in the primary or tertiary structure) the M182 binding site on IL-6R (for example, competitively with M182), and/or capable of competing with M182 for binding to IL-6R, as well as at least one further amino acid sequence and/or Nanobody that is capable of binding to at least one other antigenic determinant or epitope on IL-6R that lies in, forms part of, or overlaps with (i.e. in the primary or tertiary structure) or is in close proximity to (i.e. in the primary or tertiary structure) the D3 domain of IL-6R; and/or may be capable of specifically binding IL-6R as well as the hybrid IL-6R (as described in Example 3; SEQ ID NO: 131). Generally, such biparatopic (or multiparatopic) polypeptides of the invention may be as further described herein, and the various preferred aspects of the invention as described herein also apply to these biparatopic (or multiparatopic) polypeptides of the invention (for example, these biparatopic and multiparatopic polypeptides of the invention may comprise suitable linkers; are preferably such that they can simultaneously bind the M182 binding site on IL-6R and the at least one other antigenic determinant or epitope in the D3 domain on IL-6R; and preferably comprise single variable domains and more preferably Nanobodies).

[0260] In a preferred, but non-limiting aspect, the biparatopic (or multiparatopic) polypeptides of the invention are directed against an epitope that lies in, forms part of, or overlaps with (i.e. in the primary or tertiary structure) or is in close proximity to (i.e. in the primary or tertiary structure) the BN-12 binding site on IL-6R (for example, competitively with BN-12) and/or are capable of competing with BN-12 for binding to IL-6R, as well as against at least one other antigenic determinant or epitope on IL-6R that lies in, forms part of, or overlaps with (i.e. in the primary or tertiary structure) or is in close proximity to (i.e. in the primary or tertiary structure) the D1 domain of IL-6R; and/or may be capable of specifically binding IL-6R while not binding the hybrid IL-6R (as described in Example 3; SEQ ID NO: 131). Generally, such a biparatopic (or multiparatopic) polypeptide of the invention will contain at least one amino acid sequence and/or Nanobody that is capable of binding an epitope that lies in, forms part of, or overlaps with (i.e. in the primary or tertiary structure) or is in close proximity to (i.e. in the primary or tertiary structure) the BN-12 binding site on IL-6R (for example, competitively with M182), and/or capable of competing with BN-12 for binding to IL-6R, as well as at least one further amino acid sequence and/or Nanobody that is capable of binding to at least one other antigenic determinant or epitope on IL-6R that lies in, forms part of, or overlaps with (i.e. in the primary or tertiary structure) or is in close proximity to (i.e. in the primary or tertiary structure) the D1 domain of IL-6R; and/or may be capable of specifically binding IL-6R while not binding the hybrid IL-6R (as described in Example 3; SEQ ID NO: 131). Generally, such biparatopic (or multiparatopic) polypeptides of the invention may be as further described herein, and the various preferred aspects of the invention as described herein also apply to these biparatopic (or multiparatopic) polypeptides of the invention (for example, these biparatopic and multiparatopic polypeptides of the invention may comprise suitable linkers; are preferably such that they can simultaneously bind the BN-12 binding site on IL-6R and the at least one other antigenic determinant or epitope in the D1 domain on IL-6R; and preferably comprise single variable domains and more preferably Nanobodies).

[0261] In a preferred, but non-limiting aspect, the biparatopic (or multiparatopic) polypeptides of the invention are directed against an epitope that lies in, forms part of, or overlaps with (i.e. in the primary or tertiary structure) or is in close proximity to (i.e. in the primary or tertiary structure) the BN-12 binding site on IL-6R (for example, competitively with BN-12) and/or are capable of competing with BN-12 for binding to IL-6R, as well as against at least one other antigenic determinant or epitope on IL-6R that lies in, forms part of, or overlaps with (i.e. in the primary or tertiary structure) or is in close proximity to (i.e. in the primary or tertiary structure) the D2 domain of IL-6R; and/or may be capable of specifically binding IL-6R as well as the hybrid IL-6R (as described in Example 3; SEQ ID NO: 131). Generally, such a biparatopic (or multiparatopic) polypeptide of the invention will contain at least one amino acid sequence and/or Nanobody that is capable of binding an epitope that lies in, forms part of, or overlaps with (i.e. in the primary or tertiary structure) or is in close proximity to (i.e. in the primary or tertiary structure) the BN-12 binding site on IL-6R (for example, competitively with M182), and/or capable of competing with BN-12 for binding to IL-6R, as well as at least one further amino acid sequence and/or Nanobody that is capable of binding to at least one other antigenic determinant or epitope on IL-6R that lies in, forms part of, or overlaps with (i.e. in the primary or tertiary structure) or is in close proximity to (i.e. in the primary or tertiary structure) the D2 domain of IL-6R; and/or may be capable of specifically binding IL-6R as well as the hybrid IL-6R (as described in Example 3; SEQ ID NO: 131). Generally, such biparatopic (or multiparatopic) polypeptides of the invention may be as further described herein, and the various preferred aspects of the invention as described herein also apply to these biparatopic (or multiparatopic) polypeptides of the invention (for example, these biparatopic and multiparatopic polypeptides of the invention may comprise suitable linkers; are preferably such that they can simultaneously bind the BN-12 binding site on IL-6R and the at least one other antigenic determinant or epitope in the D2 domain on IL-6R; and preferably comprise single variable domains and more preferably Nanobodies).

[0262] In a preferred, but non-limiting aspect, the biparatopic (or multiparatopic) polypeptides of the invention are directed against an epitope that lies in, forms part of, or overlaps with (i.e. in the primary or tertiary structure) or is in close proximity to (i.e. in the primary or tertiary structure) the BN-12 binding site on IL-6R (for example, competitively with BN-12) and/or are capable of competing with BN-12 for binding to IL-6R, as well as against at least one other antigenic determinant or epitope on IL-6R that lies in, forms part of, or overlaps with (i.e. in the primary or tertiary structure) or is in close proximity to (i.e. in the primary or tertiary structure) the D3 domain of IL-6R; and/or may be capable of specifically binding IL-6R as well as the hybrid IL-6R (as described in Example 3; SEQ ID NO: 131). Generally, such a biparatopic (or multiparatopic) polypeptide of the invention will contain at least one amino acid sequence and/or Nanobody that is capable of binding an epitope that lies in, forms part of, or overlaps with (i.e. in the primary or tertiary structure) or is in close proximity to (i.e. in the primary or tertiary structure) the BN-12 binding site on IL-6R (for example, competitively with M182), and/or capable of competing with BN-12 for binding to IL-6R, as well as at least one further amino acid sequence and/or Nanobody that is capable of binding to at least one other antigenic determinant or epitope on IL-6R that lies in, forms part of, or overlaps with (i.e. in the primary or tertiary structure) or is in close proximity to (i.e. in the primary or tertiary structure) the D3 domain of IL-6R; and/or may be capable of specifically binding IL-6R as well as the hybrid IL-6R (as described in Example 3; SEQ ID NO: 131). Generally, such biparatopic (or multiparatopic) polypeptides of the invention may be as further described herein, and the various preferred aspects of the invention as described herein also apply to these biparatopic (or multiparatopic) polypeptides of the invention (for example, these biparatopic and multiparatopic polypeptides of the invention may comprise suitable linkers; are preferably such that they can simultaneously bind the BN-12 binding site on IL-6R and the at least one other antigenic determinant or epitope in the D3 domain on IL-6R; and preferably comprise single variable domains and more preferably Nanobodies).

[0263] In another preferred, but non-limiting aspect, the biparatopic (or multiparatopic) polypeptides of the invention have both paratopes directed against an epitope that lies in, forms part of, or overlaps with (i.e. in the primary or tertiary structure) or is in close proximity to (i.e. in the primary or tertiary structure) the IL-6 binding site on IL-6R (preferably, one or more of the 18 contact residues as described in Boulanger et al. 2003 (Science 300, 2101-2104) present in the extracellular D3 domain of the IL-6R, more preferably amino acid residues Phe229 and Phe279 present in the extracellular D3 domain of the IL-6R; for example, competitively with IL-6) and/or both capable of competing with IL-6 for binding to IL-6R.

[0264] Again, the above biparatopic (or multiparatopic) polypeptides of the invention may be as further described herein, and the various preferred aspects of the invention as described herein also apply to these biparatopic (or multiparatopic) polypeptides of the invention (for example, these biparatopic and multiparatopic polypeptides of the invention may comprise suitable linkers; are preferably such that they can simultaneously bind both binding sites; and preferably comprise single variable domains and more preferably Nanobodies).

[0265] In another preferred, but non-limiting aspect, the biparatopic (or multiparatopic) polypeptides of the invention are at least capable, upon binding to IL-6R, (i) to modulate, and in particular inhibit and/or prevent, binding of IL-6R to IL-6 and/or binding of the IL-6/IL-6R complex to gp130 and thus (ii) to modulate, and in particular inhibit or prevent, the signalling that is mediated by IL-6, IL-6R, IL-6/IL-6R complex and/or gp130, (iii) to modulate the biological pathways in which IL-6, IL-6R, the IL6/IL-6R complex and/or gp130 are involved, and/or (iv) to modulate the biological mechanisms, responses and effects associated with such signalling or these pathways.

[0266] Such biparatopic (or multiparatopic) polypeptides of the invention preferably comprise at least two amino acid sequences and/or Nanobodies that are capable, upon binding to IL-6R, (i) to modulate, and in particular inhibit and/or prevent, binding of IL-6R to IL-6 and thus (ii) to modulate, and in particular inhibit or prevent, the signalling that is mediated by IL-6, IL-6R, IL-6/IL-6R complex and/or gp130, (iii) to modulate the biological pathways in which IL-6, IL-6R, the IL6/IL-6R complex and/or gp130 are involved, and/or (iv) to modulate the biological mechanisms, responses and effects associated with such signalling or these pathways. Such biparatopic (or multiparatopic) polypeptides of the invention preferably comprise at least two amino acid sequences and/or Nanobodies that are directed against an epitope that lies in, forms part of, or overlaps with (i.e. in the primary or tertiary structure) or is in close proximity to (i.e. in the primary or tertiary structure) to the IL-6 binding site on IL-6R (preferably, one or more of the 18 contact residues as described in Boulanger et al. 2003 (Science 300, 2101-2104) present in the extracellular D3 domain of the IL-6R, more preferably amino acid residues Phe229 and Phe279 present in the extracellular D3 domain of the IL-6R; for example, competitively with IL-6) and/or that are capable of competing with IL-6 for binding to IL-6R. Generally, such biparatopic (or multiparatopic) polypeptides of the invention may be as further described herein, and the various preferred aspects of the invention as described herein also apply to these biparatopic (or multiparatopic) polypeptides of the invention (for example, these biparatopic and multiparatopic polypeptides of the invention may comprise suitable linkers; are preferably such that they can simultaneously bind both binding sites; and preferably comprise single variable domains and more preferably Nanobodies).

[0267] In another preferred, but non-limiting aspect, the biparatopic (or multiparatopic) polypeptides of the invention are directed against one or more of the 18 contact residues as described in Boulanger et al. 2003 (Science 300, 2101-2104) present in the extracellular D3 domain of the IL-6R (more preferably amino acid residues Phe229 and Phe279 present in the extracellular D3 domain of the IL-6R), as well as against another epitope that lies in, forms part of, or overlaps with (i.e. in the primary or tertiary structure) or is in close proximity to (i.e. in the primary or tertiary structure) the IL-6 binding site on IL-6R (for example, competitively with IL-6) and/or capable of competing with IL-6 for binding to IL-6R. Generally, such a biparatopic (or multiparatopic) polypeptide of the invention will contain at least one amino acid sequence and/or Nanobody that is capable of binding to one or more of the 18 contact residues as described in Boulanger et al. 2003 (Science 300, 2101-2104) present in the extracellular D3 domain of the IL-6R (more preferably amino acid residues Phe229 and Phe279 present in the extracellular D3 domain of the IL-6R), as well as at least one further amino acid sequence and/or Nanobody that is capable of binding to at least one other epitope that lies in, forms part of, or overlaps with (i.e. in the primary or tertiary structure) or is in close proximity to (i.e. in the primary or tertiary structure) the IL-6 binding site on IL-6R (for example, competitively with IL-6) and/or that is capable of competing with IL-6 for binding to IL-6R. Generally, such biparatopic (or multiparatopic) polypeptides of the invention may be as further described herein, and the various preferred aspects of the invention as described herein also apply to these biparatopic (or multiparatopic) polypeptides of the invention (for example, these biparatopic and multiparatopic polypeptides of the invention may comprise suitable linkers; are preferably such that they can simultaneously bind the one or more of the 18 contact residues as described in Boulanger et al. 2003 (Science 300, 2101-2104) present in the extracellular D3 domain of the IL-6R (more preferably amino acid residues Phe229 and Phe279 present in the extracellular D3 domain of the IL-6R) and the at least one other epitope that lies in, forms part of, or overlaps with (i.e. in the primary or tertiary structure) or is in close proximity to (i.e. in the primary or tertiary structure) the IL-6 binding site on IL-6R; and preferably comprise single variable domains and more preferably Nanobodies).

[0268] In another preferred, but non-limiting aspect, the biparatopic (or multiparatopic) polypeptides of the invention are directed against amino acid residues Phe229 and Phe279 present in the extracellular D3 domain of the IL-6R, as well as against another epitope that lies in, forms part of, or overlaps with (i.e. in the primary or tertiary structure) or is in close proximity to (i.e. in the primary or tertiary structure) the IL-6 binding site on IL-6R (for example, competitively with IL-6) and/or capable of competing with IL-6 for binding to IL-6R. Generally, such a biparatopic (or multiparatopic) polypeptide of the invention will contain at least one amino acid sequence and/or Nanobody that is capable of binding amino acid residues Phe229 and Phe279 present in the extracellular D3 domain of the IL-6R, as well as at least one further amino acid sequence and/or Nanobody that is capable of binding to at least one other epitope that lies in, forms part of, or overlaps with (i.e. in the primary or tertiary structure) or is in close proximity to (i.e. in the primary or tertiary structure) the IL-6 binding site on IL-6R (for example, competitively with IL-6) and/or that is capable of competing with IL-6 for binding to IL-6R. Generally, such biparatopic (or multiparatopic) polypeptides of the invention may be as further described herein, and the various preferred aspects of the invention as described herein also apply to these biparatopic (or multiparatopic) polypeptides of the invention (for example, these biparatopic and multiparatopic polypeptides of the invention may comprise suitable linkers; are preferably such that they can simultaneously bind the amino acid residues Phe229 and Phe279 present in the extracellular D3 domain of the IL-6R and the at least one other epitope that lies in, forms part of, or overlaps with (i.e. in the primary or tertiary structure) or is in close proximity to (i.e. in the primary or tertiary structure) the IL-6 binding site on IL-6R; and preferably comprise single variable domains and more preferably Nanobodies).

[0269] In another preferred, but non-limiting aspect, the biparatopic (or multiparatopic) polypeptides of the invention are at least directed against an epitope that lies in, forms part of, or overlaps with (i.e. in the primary or tertiary structure) or is in close proximity to (i.e. in the primary or tertiary structure) the IL-6 binding site on IL-6R (preferably, one or more of the 18 contact residues as described in Boulanger et al. 2003 (Science 300, 2101-2104) present in the extracellular 03 domain of the IL-6R, more preferably amino acid residues Phe229 and Phe279 present in the extracellular D3 domain of the IL-6R; for example, competitively with IL-6) and/or are capable of competing with IL-6 for binding to IL-6R as well as against an epitope that lies in, forms part of, or overlaps with (i.e. in the primary or tertiary structure) or is in close proximity to (i.e. in the primary or tertiary structure) the gp130 binding site on IL-6R and/or the IL-6/IL-6R complex (for example, competitively with gp130) and/or are capable of competing with gp130 for binding to the IL-6/IL-6R complex. Again, the above biparatopic (or multiparatopic) polypeptides of the invention may be as further described herein, and the various preferred aspects of the invention as described herein also apply to these biparatopic (or multiparatopic) polypeptides of the invention (for example, these biparatopic and multiparatopic polypeptides of the invention may comprise suitable linkers; are preferably such that they can simultaneously bind the IL-6 binding site on IL-6R and the gp130 binding site on IL-6R and/or the IL-6/IL-6R complex; and preferably comprise single variable domains and more preferably Nanobodies).

[0270] In another preferred, but non-limiting aspect, the biparatopic (or multiparatopic) polypeptides of the invention are at least capable, upon binding to IL-6R, (i) to modulate, and in particular inhibit and/or prevent, binding of IL-6R to IL-6 and/or binding of the IL-6/IL-6R complex to gp130 and thus (ii) to modulate, and in particular inhibit or prevent, the signalling that is mediated by IL-6, IL-6R, IL-6/IL-6R complex and/or gp130, (iii) to modulate the biological pathways in which IL-6, IL-6R, the IL6/IL-6R complex and/or gp130 are involved, and/or (iv) to modulate the biological mechanisms, responses and effects associated with such signalling or these pathways.

[0271] Such biparatopic (or multiparatopic) polypeptides of the invention preferably comprise at least one amino acid sequence and/or Nanobody that is capable, upon binding to IL-6R, (i) to modulate, and in particular inhibit and/or prevent, binding of IL-6R to IL-6 and thus (ii) to modulate, and in particular inhibit or prevent, the signalling that is mediated by IL-6, IL-6R, IL-6/IL-6R complex and/or gp130, (iii) to modulate the biological pathways in which IL-6, IL-6R, the IL6/IL-6R complex and/or gp130 are involved, and/or (iv) to modulate the biological mechanisms, responses and effects associated with such signalling or these pathways; as well as at least one further amino acid sequence and/or Nanobody that is capable, upon binding to IL-6R, (i) to modulate, and in particular inhibit and/or prevent, binding of the IL-6/IL-6R complex to gp130 and thus (ii) to modulate, and in particular inhibit or prevent, the signalling that is mediated by IL-6, IL-6R, IL-6/IL-6R complex and/or gp130, (iii) to modulate the biological pathways in which IL-6, IL-6R, the IL6/IL-6R complex and/or gp130 are involved, and/or (iv) to modulate the biological mechanisms, responses and effects associated with such signalling or these pathways. Such biparatopic (or multiparatopic) polypeptides of the invention preferably comprise at least one amino acid sequence of the invention that is directed against an epitope that lies in, forms part of, or overlaps with (i.e. in the primary or tertiary structure) or is in close proximity to (i.e. in the primary or tertiary structure) to the IL-6 binding site on IL-6R (preferably, one or more of the 18 contact residues as described in Boulanger et al. 2003 (Science 300, 2101-2104) present in the extracellular D3 domain of the IL-6R, more preferably amino acid residues Phe229 and Phe279 present in the extracellular D3 domain of the IL-6R; for example, competitively with IL-6) and/or are capable of competing with IL-6 for binding to IL-6R, as well as at least one further amino acid sequence of the invention that is directed against an epitope that lies in, forms part of, or overlaps with (i.e. in the primary or tertiary structure) or is in close proximity to (i.e. in the primary or tertiary structure) to the gp130 binding site on IL-6R and/or the IL-6/IL-6R complex (for example, competitively with gp130) and/or that is capable of competing with gp130 for binding to the IL-6/IL-6R complex. Generally, such biparatopic (or multiparatopic) polypeptides of the invention may be as further described herein, and the various preferred aspects of the invention as described herein also apply to these biparatopic (or multiparatopic) polypeptides of the invention (for example, these biparatopic and multiparatopic polypeptides of the invention may comprise suitable linkers; are preferably such that they can simultaneously bind the IL-6 binding site on IL-6R and the gp130 binding site on IL-6R and/or the IL-6/IL-6R complex; and preferably comprise single variable domains and more preferably Nanobodies).

[0272] In another preferred, but non-limiting aspect, the biparatopic (or multiparatopic) polypeptides of the invention may have both paratopes directed against an epitope that lies in, forms part of, or overlaps with (i.e. in the primary or tertiary structure) or is in close proximity to (i.e. in the primary or tertiary structure) the gp130 binding site on IL-6R and/or the IL-6/IL-6R complex (for example, competitively with gp130) and/or are both capable of competing with gp130 for binding to the IL-6/IL-6R complex.

[0273] Again, the above biparatopic (or multiparatopic) polypeptides of the invention may be as further described herein, and the various preferred aspects of the invention as described herein also apply to these biparatopic (or multiparatopic) polypeptides of the invention (for example, these biparatopic and multiparatopic polypeptides of the invention may comprise suitable linkers; are preferably such that they can simultaneously bind both binding sites; and preferably comprise single variable domains and more preferably Nanobodies).

[0274] In another preferred, but non-limiting aspect, the biparatopic (or multiparatopic) polypeptides of the invention are biparatopic (or multiparatopic) and are at least capable, upon binding to IL-6R, (i) to modulate, and in particular inhibit and/or prevent, binding of the IL-6/IL-6R complex to gp130 and thus (ii) to modulate, and in particular inhibit or prevent, the signalling that is mediated by IL-6, IL-6R, IL-6/IL-6R complex and/or gp130, (iii) to modulate the biological pathways in which IL-6, IL-6R, the IL6/IL-6R complex and/or gp130 are involved, and/or (iv) to modulate the biological mechanisms, responses and effects associated with such signalling or these pathways.

[0275] Such biparatopic (or multiparatopic) polypeptides of the invention preferably comprise at least two amino acid sequences and/or Nanobodies that are capable, upon binding to IL-6R, (i) to modulate, and in particular inhibit and/or prevent, binding of the IL-6/IL-6R complex to gp130 and thus (ii) to modulate, and in particular inhibit or prevent, the signalling that is mediated by IL-6, IL-6R, IL-6/IL-6R complex and/or gp130, (iii) to modulate the biological pathways in which IL-6, IL-6R, the IL6/IL-6R complex and/or gp130 are involved, and/or (iv) to modulate the biological mechanisms, responses and effects associated with such signalling or these pathways. Such biparatopic (or multiparatopic) polypeptides of the invention preferably comprise at least two amino acid sequences and/or Nanobodies that are directed against an epitope that lies in, forms part of, or overlaps with (i.e. in the primary or tertiary structure) or is in close proximity to (i.e. in the primary or tertiary structure) to the gp130 binding site on IL-6R and/or the IL-6/IL-6R complex (for example, competitively with gp130) and/or are capable of competing with gp130 for binding to the IL-6/IL-6R complex. Generally, such biparatopic (or multiparatopic) polypeptides of the invention may be as further described herein, and the various preferred aspects of the invention as described herein also apply to these biparatopic (or multiparatopic) polypeptides of the invention (for example, these biparatopic and multiparatopic polypeptides of the invention may comprise suitable linkers; are preferably such that they can simultaneously bind both binding sites; and preferably comprise single variable domains and more preferably Nanobodies).

[0276] In another preferred, but non-limiting aspect, the biparatopic (or multiparatopic) polypeptides of the invention are at least directed against an epitope that lies in, forms part of, or overlaps with (i.e. in the primary or tertiary structure) or is in close proximity to (i.e. in the primary or tertiary structure) the IL-6 binding site on IL-6R (preferably, one or more of the 18 contact residues as described in Boulanger et al. 2003 (Science 300, 2101-2104) present in the extracellular D3 domain of the IL-6R, more preferably amino acid residues Phe229 and Phe279 present in the extracellular D3 domain of the IL-6R; for example, competitively with IL-6) and/or are capable of competing with IL-6 for binding to IL-6R as well as against an epitope that lies in, forms part of, or overlaps with (i.e. in the primary or tertiary structure) or is in close proximity to (i.e. in the primary or tertiary structure) the binding site of the reference IgG and/or the reference Fab on IL-6R (for example, competitively with the reference IgG and/or the reference Fab) and/or are capable of competing with the reference IgG and/or the reference Fab for binding to IL-6R. Again, the above biparatopic (or multiparatopic) polypeptides of the invention may be as further described herein, and the various preferred aspects of the invention as described herein also apply to these biparatopic (or multiparatopic) polypeptides of the invention (for example, these biparatopic and multiparatopic polypeptides of the invention may comprise suitable linkers; are preferably such that they can simultaneously bind the IL-6 binding site and the binding site for the reference IgG and/or the reference Fab on IL-6R; and preferably comprise single variable domains and more preferably Nanobodies).

[0277] In another preferred, but non-limiting aspect, the biparatopic (or multiparatopic) polypeptides of the invention are at least capable, upon binding to IL-6R, (i) to modulate, and in particular inhibit and/or prevent, binding of IL-6R to IL-6 and/or binding of the IL-6/IL-6R complex to gp130 and thus (ii) to modulate, and in particular inhibit or prevent, the signalling that is mediated by IL-6, IL-6R, IL-6/IL-6R complex and/or gp130, (iii) to modulate the biological pathways in which IL-6, IL-6R, the IL6/IL-6R complex and/or gp130 are involved, and/or (iv) to modulate the biological mechanisms, responses and effects associated with such signalling or these pathways, or more generally capable of modulating (as defined herein) IL-6R or IL-6R mediated signalling via the same mechanism of action as the reference IgG and/or the reference Fab.

[0278] Such biparatopic (or multiparatopic) polypeptides of the invention preferably comprise at least one amino acid sequence and/or Nanobody that is capable, upon binding to IL-6R, (i) to modulate, and in particular inhibit and/or prevent, binding of IL-6R to IL-6 and thus (ii) to modulate, and in particular inhibit or prevent, the signalling that is mediated by IL-6, IL-6R, IL-6/IL-6R complex and/or gp130, (iii) to modulate the biological pathways in which IL-6, IL-6R, the IL6/IL-6R complex and/or gp130 are involved, and/or (iv) to modulate the biological mechanisms, responses and effects associated with such signalling or these pathways; as well as at least one further amino acid sequence and/or Nanobody that is capable, upon binding to IL-6R, (i) to modulate, and in particular inhibit and/or prevent, binding of IL-6R to IL-6 and thus (ii) to modulate, and in particular inhibit or prevent, the signalling that is mediated by IL-6, IL-6R, IL-6/IL-6R complex and/or gp130, (iii) to modulate the biological pathways in which IL-6, IL-6R, the IL-6 μL-6R complex and/or gp130 are involved, and/or (iv) to modulate the biological mechanisms, responses and effects associated with such signalling or these pathways, or more generally capable of modulating (as defined herein) IL-6R or IL-6R mediated signalling via the same mechanism of action as the reference IgG and/or the reference Fab. Such biparatopic (or multiparatopic) polypeptides of the invention preferably comprise at least one amino acid sequence and/or Nanobody that is directed against an epitope that lies in, forms part of, or overlaps with (i.e. in the primary or tertiary structure) or is in close proximity to (i.e. in the primary or tertiary structure) to the IL-6 binding site on IL-6R (preferably, one or more of the 18 contact residues as described in Boulanger et al. 2003 (Science 300, 2101-2104) present in the extracellular D3 domain of the IL-6R, more preferably amino acid residues Phe229 and Phe279 present in the extracellular D3 domain of the IL-6R; for example, competitively with IL-6) and/or that is capable of competing with IL-6 for binding to IL-6R, as well as at least one further amino acid sequence and/or Nanobody that is directed against an epitope that lies in, forms part of, or overlaps with (i.e. in the primary or tertiary structure) or is in close proximity to (i.e. in the primary or tertiary structure) to the binding site for the reference IgG and/or the reference Fab on IL-6R (for example, competitively with the reference IgG and/or the reference Fab) and/or that is capable of competing with the reference IgG and/or the reference Fab for binding to IL-6R. Generally, such biparatopic (or multiparatopic) polypeptides of the invention may be as further described herein, and the various preferred aspects of the invention as described herein also apply to these biparatopic (or multiparatopic) polypeptides of the invention (for example, these biparatopic and multiparatopic polypeptides of the invention may comprise suitable linkers; are preferably such that they can simultaneously bind the IL-6 binding site and the binding site for the reference IgG and/or the reference Fab on IL-6R; and preferably comprise single variable domains and more preferably Nanobodies).

[0279] In another preferred, but non-limiting aspect, the biparatopic (or multiparatopic) polypeptides of the invention are at least directed against an epitope that lies in, forms part of, or overlaps with (i.e. in the primary or tertiary structure) or is in close proximity to (i.e. in the primary or tertiary structure) the binding site for the reference IgG and/or the reference Fab on IL-6R (for example, competitively with IL-6) and/or are capable of competing with the reference IgG and/or the reference Fab for binding to IL-6R as well as against an epitope that lies in, forms part of, or overlaps with (i.e. in the primary or tertiary structure) or is in close proximity to (i.e. in the primary or tertiary structure) the gp130 binding site on IL-6R and/or the IL-6/IL-6R complex (for example, competitively with gp130) and/or are capable of competing with gp130 for binding to the IL-6/IL-6R complex. Again, the above biparatopic (or multiparatopic) polypeptides of the invention may be as further described herein, and the various preferred aspects of the invention as described herein also apply to these biparatopic (or multiparatopic) polypeptides of the invention (for example, these biparatopic and multiparatopic polypeptides of the invention may comprise suitable linkers; are preferably such that they can simultaneously bind the binding site for the reference IgG and/or the reference Fab on IL-6R and the gp130 binding site on IL-6R and/or the IL-6/IL-6R complex; and preferably comprise single variable domains and more preferably Nanobodies).

[0280] In another preferred, but non-limiting aspect, the biparatopic (or multiparatopic) polypeptides of the invention are at least capable, upon binding to IL-6R, (i) to modulate, and in particular inhibit and/or prevent, binding of IL-6R to IL-6 and/or binding of the IL-6/IL-6R complex to gp130 and thus (ii) to modulate, and in particular inhibit or prevent, the signalling that is mediated by IL-6, IL-6R, IL-6/IL-6R complex and/or gp130, (iii) to modulate the biological pathways in which IL-6, IL-6R, the IL6/IL-6R complex and/or gp130 are involved, and/or (iv) to modulate the biological mechanisms, responses and effects associated with such signalling or these pathways, or more generally capable of modulating (as defined herein) IL-6R or IL-6R mediated signalling via the same mechanism of action as the reference IgG and/or the reference Fab.

[0281] Such biparatopic (or multiparatopic) polypeptides of the invention preferably comprise at least one amino acid sequence and/or Nanobody that is capable, upon binding to IL-6R, (i) to modulate, and in particular inhibit and/or prevent, binding of IL-6R to IL-6 and thus (ii) to modulate, and in particular inhibit or prevent, the signalling that is mediated by IL-6, IL-6R, IL-6/IL-6R complex and/or gp130, (iii) to modulate the biological pathways in which IL-6, IL-6R, the IL6/IL-6R complex and/or gp130 are involved, and/or (iv) to modulate the biological mechanisms, responses and effects associated with such signalling or these pathways, or more generally capable of modulating (as defined herein) IL-6R or IL-6R mediated signalling via the same mechanism of action as the reference IgG and/or the reference Fab; as well as at least one further amino acid sequence and/or Nanobody that is capable, upon binding to IL-6R, (i) to modulate, and in particular inhibit and/or prevent, binding of the IL-6/IL-6R complex to gp130 and thus (ii) to modulate, and in particular inhibit or prevent, the signalling that is mediated by IL-6, IL-6R, IL-6/IL-6R complex and/or gp130, (iii) to modulate the biological pathways in which IL-6, IL-6R, the IL6/IL-6R complex and/or gp130 are involved, and/or (iv) to modulate the biological mechanisms, responses and effects associated with such signalling or these pathways. Such biparatopic (or multiparatopic) polypeptides of the invention preferably comprise at least one amino acid sequence and/or Nanobody that is directed against an epitope that lies in, forms part of, or overlaps with (i.e. in the primary or tertiary structure) or is in close proximity to (i.e. in the primary or tertiary structure) to the binding site for the reference IgG and/or the reference Fab on IL-6R (for example, competitively with IL-6) and/or that is capable of competing with the reference IgG and/or the reference Fab for binding to IL-6R, as well as at least one further amino acid sequence and/or Nanobody that is directed against an epitope that lies in, forms part of, or overlaps with (i.e. in the primary or tertiary structure) or is in close proximity to (i.e. in the primary or tertiary structure) to the gp130 binding site on IL-6R and/or the IL-6/IL-6R complex (for example, competitively with gp130) and/or that is capable of competing with gp130 for binding the IL-6/IL-6R complex. Generally, such biparatopic (or multiparatopic) polypeptides of the invention may be as further described herein, and the various preferred aspects of the invention as described herein also apply to these biparatopic (or multiparatopic) polypeptides of the invention (for example, these biparatopic and multiparatopic polypeptides of the invention may comprise suitable linkers; are preferably such that they can simultaneously bind the binding site for the reference IgG and/or the reference Fab on IL-6R and the gp130 binding site on IL-6R and/or the IL-6/IL-6R complex; and preferably comprise single variable domains and more preferably Nanobodies).

[0282] In another preferred, but non-limiting aspect, the biparatopic (or multiparatopic) polypeptides of the invention have both paratopes directed against an epitope that lies in, forms part of, or overlaps with (i.e. in the primary or tertiary structure) or is in close proximity to (i.e. in the primary or tertiary structure) the binding site for the reference IgG and/or the reference Fab on IL-6R (for example, competitively with the reference IgG and/or the reference Fab) and/or are both capable of competing with the reference IgG and/or the reference Fab for binding to IL-6R.

[0283] Again, the above biparatopic (or multiparatopic) polypeptides of the invention may be as further described herein, and the various preferred aspects of the invention as described herein also apply to these biparatopic (or multiparatopic) polypeptides of the invention (for example, these biparatopic and multiparatopic polypeptides of the invention may comprise suitable linkers; are preferably such that they can simultaneously bind both binding sites; and preferably comprise single variable domains and more preferably Nanobodies).

[0284] In another preferred, but non-limiting aspect, the biparatopic (or multiparatopic) polypeptides of the invention are at least capable, upon binding to IL-6R, (i) to modulate, and in particular inhibit and/or prevent, binding of IL-6R to IL-6 and/or binding of the IL-6/IL-6R complex to gp130 and thus (ii) to modulate, and in particular inhibit or prevent, the signalling that is mediated by IL-6, IL-6R, IL-6/IL-6R complex and/or gp130, (iii) to modulate the biological pathways in which IL-6, IL-6R, the IL6/IL-6R complex and/or gp130 are involved, and/or (iv) to modulate the biological mechanisms, responses and effects associated with such signalling or these pathways, or more generally capable of modulating (as defined herein) IL-6R or IL-6R mediated signalling via the same mechanism of action as the reference IgG and/or the reference Fab.

[0285] Such biparatopic (or multiparatopic) polypeptides of the invention preferably comprise at least two amino acid sequences and/or Nanobodies of that are capable, upon binding to IL-6R, (i) to modulate, and in particular inhibit and/or prevent, binding of IL-6R to IL-6 and thus (ii) to modulate, and in particular inhibit or prevent, the signalling that is mediated by IL-6, IL-6R, IL-6/IL-6R complex and/or gp130, (iii) to modulate the biological pathways in which IL-6, IL-6R, the IL6/IL-6R complex and/or gp130 are involved, and/or (iv) to modulate the biological mechanisms, responses and effects associated with such signalling or these pathways, or more generally capable of modulating (as defined herein) IL-6R or IL-6R mediated signalling via the same mechanism of action as the reference IgG and/or the reference Fab. Such biparatopic (or multiparatopic) polypeptides of the invention preferably comprise at least two amino acid sequences and/or Nanobodies that are directed against an epitope that lies in, forms part of, or overlaps with (i.e. in the primary or tertiary structure) or is in close proximity to (i.e. in the primary or tertiary structure) to the binding site for the reference IgG and/or the reference Fab on IL-6R (for example, competitively with the reference IgG and/or the reference Fab) and/or that are capable of competing with the reference IgG and/or the reference Fab for binding to IL-6R. Generally, such biparatopic (or multiparatopic) polypeptides of the invention may be as further described herein, and the various preferred aspects of the invention as described herein also apply to these biparatopic (or multiparatopic) polypeptides of the invention (for example, these biparatopic and multiparatopic polypeptides of the invention may comprise suitable linkers; are preferably such that they can simultaneously bind both binding on IL-6R; and preferably comprise single variable domains and more preferably Nanobodies).

[0286] In another preferred, but non-limiting aspect, the amino acid sequences and (in particular) biparatopic (or multiparatopic) polypeptides of the invention are at least directed against an epitope that lies in, forms part of, or overlaps with (i.e. in the primary or tertiary structure) or is in close proximity to (i.e. in the primary or tertiary structure) the IL-6 binding site on IL-6R (preferably, one or more of the 18 contact residues as described in Boulanger et al. 2003 (Science 300, 2101-2104) present in the extracellular D3 domain of the IL-6R, more preferably amino acid residues Phe229 and Phe279 present in the extracellular D3 domain of the IL-6R; for example, competitively with IL-6) and/or are capable of competing with IL-6 for binding to IL-6R as well as against an epitope that lies in, forms part of, or overlaps with (i.e. in the primary or tertiary structure) or is in close proximity to (i.e. in the primary or tertiary structure) the Tocilizumab (MRA) binding site on IL-6R (for example, competitively with Tocilizumab (MRA)) and/or are capable of competing with Tocilizumab (MRA) for binding to IL-6R. Again, the above biparatopic (or multiparatopic) polypeptides of the invention may be as further described herein, and the various preferred aspects of the invention as described herein also apply to these biparatopic (or multiparatopic) polypeptides of the invention (for example, these biparatopic and multiparatopic polypeptides of the invention may comprise suitable linkers; are preferably such that they can simultaneously bind the IL-6 binding site and the Tocilizumab (MRA) binding site on IL-6R; and preferably comprise single variable domains and more preferably Nanobodies).

[0287] In another preferred, but non-limiting aspect, the biparatopic (or multiparatopic) polypeptides of the invention are at least capable, upon binding to IL-6R, (i) to modulate, and in particular inhibit and/or prevent, binding of IL-6R to IL-6 and/or binding of the IL-6/IL-6R complex to gp130 and thus (ii) to modulate, and in particular inhibit or prevent, the signalling that is mediated by IL-6, IL-6R, IL-6/IL-6R complex and/or gp130, (iii) to modulate the biological pathways in which IL-6, IL-6R, the IL6/IL-6R complex and/or gp130 are involved, and/or (iv) to modulate the biological mechanisms, responses and effects associated with such signalling or these pathways, or more generally capable of modulating (as defined herein) IL-6R or IL-6R mediated signalling via the same mechanism of action as Tocilizumab (MRA).

[0288] Such biparatopic (or multiparatopic) polypeptides of the invention preferably comprise at least one amino acid sequence and/or Nanobody that is capable, upon binding to IL-6R, (i) to modulate, and in particular inhibit and/or prevent, binding of IL-6R to IL-6 and thus (ii) to modulate, and in particular inhibit or prevent, the signalling that is mediated by IL-6, IL-6R, IL-6/IL-6R complex and/or gp130, (iii) to modulate the biological pathways in which IL-6, IL-6R, the IL6/IL-6R complex and/or gp130 are involved, and/or (iv) to modulate the biological mechanisms, responses and effects associated with such signalling or these pathways; as well as at least one further amino acid sequence and/or Nanobody that is capable, upon binding to IL-6R, (1) to modulate, and in particular inhibit and/or prevent, binding of IL-6R to IL-6 and thus (ii) to modulate, and in particular inhibit or prevent, the signalling that is mediated by IL-6, IL-6R, IL-6/IL-6R complex and/or gp130, (iii) to modulate the biological pathways in which IL-6, IL-6R, the IL6/IL-6R complex and/or gp130 are involved, and/or (iv) to modulate the biological mechanisms, responses and effects associated with such signalling or these pathways, or more generally capable of modulating (as defined herein) IL-6R or IL-6R mediated signalling via the same mechanism of action as Tocilizumab (MRA). Such biparatopic (or multiparatopic) polypeptides of the invention preferably comprise at least one amino acid sequence and/or Nanobody that is directed against an epitope that lies in, forms part of, or overlaps with (i.e. in the primary or tertiary structure) or is in close proximity to (i.e. in the primary or tertiary structure) to the IL-6 binding site on IL-6R (preferably, one or more of the 18 contact residues as described in Boulanger et al. 2003 (Science 300, 2101-2104) present in the extracellular D3 domain of the IL-6R, more preferably amino acid residues Phe229 and Phe279 present in the extracellular D3 domain of the IL-6R; for example, competitively with IL-6) and/or are capable of competing with IL-6 for binding to IL-6R, as well as at least one further amino acid sequence and/or Nanobody that is directed against an epitope that lies in, forms part of, or overlaps with (i.e. in the primary or tertiary structure) or is in close proximity to (i.e. in the primary or tertiary structure) to the Tocilizumab (MRA) binding site on IL-6R (for example, competitively with Tocilizumab (MRA)) and/or that is capable of competing with Tocilizumab (MRA) for binding to IL-6R. Generally, such biparatopic (or multiparatopic) polypeptides of the invention may be as further described herein, and the various preferred aspects of the invention as described herein also apply to these biparatopic (or multiparatopic) polypeptides of the invention (for example, these biparatopic and multiparatopic polypeptides of the invention may comprise suitable linkers; are preferably such that they can simultaneously bind the IL-6 binding site and the Tocilizumab (MRA) binding site on IL-6R; and preferably comprise single variable domains and more preferably Nanobodies).

[0289] In another preferred, but non-limiting aspect, the biparatopic (or multiparatopic) polypeptides of the invention are at least directed against an epitope that lies in, forms part of, or overlaps with (i.e. in the primary or tertiary structure) or is in close proximity to (i.e. in the primary or tertiary structure) the Tocilizumab (MRA) binding site on IL-6R (for example, competitively with Tocilizumab (MRA)) and/or are capable of competing with Tocilizumab (MRA) for binding to IL-6R as well as against an epitope that lies in, forms part of, or overlaps with (i.e. in the primary or tertiary structure) or is in close proximity to (i.e. in the primary or tertiary structure) the gp130 binding site on IL-6R and/or the IL-6/IL-6R complex (for example, competitively with gp130) and/or are capable of competing with gp130 for binding to the IL-6/IL-6R complex. Again, the above biparatopic (or multiparatopic) polypeptides of the invention may be as further described herein, and the various preferred aspects of the invention as described herein also apply to these biparatopic (or multiparatopic) polypeptides of the invention (for example, these biparatopic and multiparatopic polypeptides of the invention may comprise suitable linkers; are preferably such that they can simultaneously bind the Tocilizumab (MRA) binding site on IL-6R and the gp130 binding site on IL-6R and/or the IL-6/IL-6R complex; and preferably comprise single variable domains and more preferably Nanobodies).

[0290] In another preferred, but non-limiting aspect, the biparatopic (or multiparatopic) polypeptides of the invention are at least capable, upon binding to IL-6R, (i) to modulate, and in particular inhibit and/or prevent, binding of IL-6R to IL-6 and/or binding of the IL-6/IL-6R complex to gp130 and thus (ii) to modulate, and in particular inhibit or prevent, the signalling that is mediated by IL-6, IL-6R, IL-6/IL-6R complex and/or gp130, (iii) to modulate the biological pathways in which IL-6, IL-6R, the IL6/IL-6R complex and/or gp130 are involved, and/or (iv) to modulate the biological mechanisms, responses and effects associated with such signalling or these pathways, or more generally capable of modulating (as defined herein) IL-6R or IL-6R mediated signalling via the same mechanism of action as Tocilizumab (MRA).

[0291] Such biparatopic (or multiparatopic) polypeptides of the invention preferably comprise at least one amino acid sequence and/or Nanobody that is capable, upon binding to IL-6R, (i) to modulate, and in particular inhibit and/or prevent, binding of IL-6R to IL-6 and thus (ii) to modulate, and in particular inhibit or prevent, the signalling that is mediated by IL-6, IL-6R, IL-6/IL-6R complex and/or gp130, (iii) to modulate the biological pathways in which IL-6, IL-6R, the IL6/IL-6R complex and/or gp130 are involved, and/or (iv) to modulate the biological mechanisms, responses and effects associated with such signalling or these pathways, or more generally capable of modulating (as defined herein) IL-6R or IL-6R mediated signalling via the same mechanism of action as Tocilizumab (MRA); as well as at least one further amino acid sequence and/or Nanobody that is capable, upon binding to IL-6R, (i) to modulate, and in particular inhibit and/or prevent, binding of the IL-6/IL-6R complex to gp130 and thus (ii) to modulate, and in particular inhibit or prevent, the signalling that is mediated by IL-6, IL-6R, IL-6/IL-6R complex and/or gp130, (iii) to modulate the biological pathways in which IL-6, IL-6R, the IL6/IL-6R complex and/or gp130 are involved, and/or (iv) to modulate the biological mechanisms, responses and effects associated with such signalling or these pathways. Such biparatopic (or multiparatopic) polypeptides of the invention preferably comprise at least one amino acid sequence and/or Nanobody that is directed against an epitope that lies in, forms part of, or overlaps with (i.e. in the primary or tertiary structure) or is in close proximity to (i.e. in the primary or tertiary structure) to the Tocilizumab (MRA) binding site on IL-6R (for example, competitively with Tocilizumab (MRA)) and/or that is capable of competing with Tocilizumab (MRA) for binding to IL-6R, as well as at least one further amino acid sequence and/or Nanobody that is directed against an epitope that lies in, forms part of, or overlaps with (i.e. in the primary or tertiary structure) or is in close proximity to (i.e. in the primary or tertiary structure) to the gp130 binding site on IL-6R and/or the IL6/IL-6R complex (for example, competitively with gp130) and/or that is capable of competing with gp130 for binding to the IL6/IL-6R complex. Generally, such biparatopic (or multiparatopic) polypeptides of the invention may be as further described herein, and the various preferred aspects of the invention as described herein also apply to these biparatopic (or multiparatopic) polypeptides of the invention (for example, these biparatopic and multiparatopic polypeptides of the invention may comprise suitable linkers; are preferably such that they can simultaneously bind the Tocilizumab (MRA) binding site on IL-6R and the gp130 binding site on IL-6R and/or the IL6/IL-6R complex; and preferably comprise single variable domains and more preferably Nanobodies).

[0292] In another preferred, but non-limiting aspect, the biparatopic (or multiparatopic) polypeptides of the invention are at least directed against an epitope that lies in, forms part of, or overlaps with (i.e. in the primary or tertiary structure) or is in close proximity to (i.e. in the primary or tertiary structure) the binding site for the reference IgG and/or the reference Fab on IL-6R (for example, competitively with the reference IgG and/or the reference Fab) and/or are capable of competing with the reference IgG and/or the reference Fab for binding to IL-6R as well as against an epitope that lies in, forms part of, or overlaps with (i.e. in the primary or tertiary structure) or is in close proximity to (i.e. in the primary or tertiary structure) the Tocilizumab (MRA) binding site on IL-6R (for example, competitively with Tocilizumab (MRA)) and/or are capable of competing with Tocilizumab (MRA) for binding to IL-6R. Again, the above biparatopic (or multiparatopic) polypeptides of the invention may be as further described herein, and the various preferred aspects of the invention as described herein also apply to these biparatopic (or multiparatopic) polypeptides of the invention (for example, these biparatopic and multiparatopic polypeptides of the invention may comprise suitable linkers; are preferably such that they can simultaneously bind the binding site for the reference IgG and/or the reference Fab and the Tocilizumab (MRA) binding site on IL-6R; and preferably comprise single variable domains and more preferably Nanobodies).

[0293] In another preferred, but non-limiting aspect, the amino acid sequences and (in particular) polypeptides of the invention are biparatopic (or multiparatopic) and are at least capable, upon binding to IL-6R, (i) to modulate, and in particular inhibit and/or prevent, binding of IL-6R to IL-6 and/or binding of the IL-6/IL-6R complex to gp130 and thus (ii) to modulate, and in particular inhibit or prevent, the signalling that is mediated by IL-6, IL-6R, IL-6/IL-6R complex and/or gp130, (iii) to modulate the biological pathways in which IL-6, IL-6R, the IL6/IL-6R complex and/or gp130 are involved, and/or (iv) to modulate the biological mechanisms, responses and effects associated with such signalling or these pathways, or more generally capable of modulating (as defined herein) IL-6R or IL-6R mediated signalling via the same mechanism of action as Tocilizumab (MRA) and/or the reference IgG and/or the reference Fab.

[0294] Such biparatopic (or multiparatopic) polypeptides of the invention preferably comprise at least one amino acid sequence and/or Nanobody that is capable, upon binding to IL-6R, (i) to modulate, and in particular inhibit and/or prevent, binding of IL-6R to IL-6 and thus (ii) to modulate, and in particular inhibit or prevent, the signalling that is mediated by IL-6, IL-6R, IL-6/IL-6R complex and/or gp130, (iii) to modulate the biological pathways in which IL-6, IL-6R, the IL-6/IL-6R complex and/or gp130 are involved, and/or (iv) to modulate the biological mechanisms, responses and effects associated with such signalling or these pathways, or more generally capable of modulating (as defined herein) IL-6R or IL-6R mediated signalling via the same mechanism of action as the reference IgG and/or the reference Fab; as well as at least one further amino acid sequence and/or Nanobody of the invention that is capable, upon binding to IL-6R, (i) to modulate, and in particular inhibit and/or prevent, binding of IL-6R to IL-6 and thus (ii) to modulate, and in particular inhibit or prevent, the signalling that is mediated by IL-6, IL-6R, IL-6/IL-6R complex and/or gp130, (iii) to modulate the biological pathways in which IL-6, IL-6R, the IL6/IL-6R complex and/or gp130 are involved, and/or (iv) to modulate the biological mechanisms, responses and effects associated with such signalling or these pathways, or more generally capable of modulating (as defined herein) IL-6R or IL-6R mediated signalling via the same mechanism of action as Tocilizumab (MRA). Such biparatopic (or multiparatopic) polypeptides of the invention preferably comprise at least one amino acid sequence and/or Nanobody that is directed against an epitope that lies in, forms part of, or overlaps with (i.e. in the primary or tertiary structure) or is in close proximity to (i.e. in the primary or tertiary structure) to the binding site for the reference IgG and/or the reference Fab on IL-6R (for example, competitively with the reference IgG and/or the reference Fab) and/or are capable of competing with the reference IgG and/or the reference Fab for binding to IL-6R, as well as at least one further amino acid sequence and/or Nanobody that is directed against an epitope that lies in, forms part of, or overlaps with (i.e. in the primary or tertiary structure) or is in close proximity to (i.e. in the primary or tertiary structure) to the Tocilizumab (MRA) binding site on IL-6R (for example, competitively with Tocilizumab (MRA)) and/or that is capable of competing with Tocilizumab (MRA) for binding to IL-6R. Generally, such biparatopic (or multiparatopic) polypeptides of the invention may be as further described herein, and the various preferred aspects of the invention as described herein also apply to these biparatopic (or multiparatopic) polypeptides of the invention (for example, these biparatopic and multiparatopic polypeptides of the invention may comprise suitable linkers; are preferably such that they can simultaneously bind the binding site for the reference IgG and/or the reference Fab and the Tocilizumab (MRA) binding site on IL-6R; and preferably comprise single variable domains and more preferably Nanobodies).

[0295] In another preferred, but non-limiting aspect, the biparatopic (or multiparatopic) polypeptides of the invention may have both paratopes directed against an epitope that lies in, forms part of, or overlaps with (i.e. in the primary or tertiary structure) or is in close proximity to (i.e. in the primary or tertiary structure) the Tocilizumab (MRA) binding site on IL-6R (for example, competitively with Tocilizumab (MRA)) and/or are both capable of competing with Tocilizumab (MRA) for binding to IL-6R.

[0296] Again, the above biparatopic (or multiparatopic) polypeptides of the invention may be as further described herein, and the various preferred aspects of the invention as described herein also apply to these biparatopic (or multiparatopic) polypeptides of the invention (for example, these biparatopic and multiparatopic polypeptides of the invention may comprise suitable linkers; are preferably such that they can simultaneously bind both binding sites on IL-6R; and preferably comprise single variable domains and more preferably Nanobodies).

[0297] In another preferred, but non-limiting aspect, the amino acid sequences and (in particular) polypeptides of the invention are biparatopic (or multiparatopic) and are at least capable, upon binding to IL-6R, (i) to modulate, and in particular inhibit and/or prevent, binding of IL-6R to IL-6 and/or binding of the IL-6/IL-6R complex to gp130 and thus (ii) to modulate, and in particular inhibit or prevent, the signalling that is mediated by IL-6, IL-6R, IL-6/IL-6R complex and/or gp130, (iii) to modulate the biological pathways in which IL-6, IL-6R, the IL6/IL-6R complex and/or gp130 are involved, and/or (iv) to modulate the biological mechanisms, responses and effects associated with such signalling or these pathways, or more generally capable of modulating (as defined herein) IL-6R or IL-6R mediated signalling via the same mechanism of action as Tocilizumab (MRA).

[0298] Such biparatopic (or multiparatopic) polypeptides of the invention preferably comprise at least two amino acid sequences and/or Nanobodies that are capable, upon binding to IL-6R, (i) to modulate, and in particular inhibit and/or prevent, binding of IL-6R to IL-6 and thus (ii) to modulate, and in particular inhibit or prevent, the signalling that is mediated by IL-6, IL-6R, IL-6/IL-6R complex and/or gp130, (iii) to modulate the biological pathways in which IL-6, IL-6R, the IL6/IL-6R complex and/or gp130 are involved, and/or (iv) to modulate the biological mechanisms, responses and effects associated with such signalling or these pathways, or more generally capable of modulating (as defined herein) IL-6R or IL-6R mediated signalling via the same mechanism of action as Tocilizumab (MRA). Such biparatopic (or multiparatopic) polypeptides of the invention preferably comprise at least two amino acid sequences and/or Nanobodies that are directed against an epitope that lies in, forms part of, or overlaps with (i.e. in the primary or tertiary structure) or is in close proximity to (i.e. in the primary or tertiary structure) to the Tocilizumab (MRA) binding site on IL-6R (for example, competitively with Tocilizumab (MRA)) and/or that are capable of competing with Tocilizumab (MRA) for binding to IL-6R. Generally, such biparatopic (or multiparatopic) polypeptides of the invention may be as further described herein, and the various preferred aspects of the invention as described herein also apply to these biparatopic (or multiparatopic) polypeptides of the invention (for example, these biparatopic and multiparatopic polypeptides of the invention may comprise suitable linkers; are preferably such that they can simultaneously bind both binding sites on IL-6R; and preferably comprise single variable domains and more preferably Nanobodies).

[0299] In another preferred, but non-limiting aspect, the biparatopic (or multiparatopic) polypeptides of the invention are at least directed against an epitope that lies in, forms part of, or overlaps with (i.e. in the primary or tertiary structure) or is in close proximity to (i.e. in the primary or tertiary structure) the IL-6 binding site on IL-6R (preferably, one or more of the 18 contact residues as described in Boulanger et al. 2003 (Science 300, 2101-2104) present in the extracellular 03 domain of the IL-6R, more preferably amino acid residues Phe229 and Phe279 present in the extracellular D3 domain of the IL-6R; for example, competitively with IL-6) and/or are capable of competing with IL-6 for binding to IL-6R as well as against an epitope that lies in, forms part of, or overlaps with (i.e. in the primary or tertiary structure) or is in close proximity to (i.e. in the primary or tertiary structure) the M182 binding site on IL-6R (for example, competitively with M182) and/or are capable of competing with M182 for binding to IL-6R. Again, the above biparatopic (or multiparatopic) polypeptides of the invention may be as further described herein, and the various preferred aspects of the invention as described herein also apply to these biparatopic (or multiparatopic) polypeptides of the invention (for example, these biparatopic and multiparatopic polypeptides of the invention may comprise suitable linkers; are preferably such that they can simultaneously bind the IL-6 binding site and the M182 binding site on IL-6R; and preferably comprise single variable domains and more preferably Nanobodies).

[0300] In another preferred, but non-limiting aspect, the biparatopic (or multiparatopic) polypeptides of the invention are at least capable, upon binding to IL-6R, (i) to modulate, and in particular inhibit and/or prevent, binding of IL-6 to IL-6R and/or binding of the IL-6/IL-6R complex to gp130 and thus (ii) to modulate, and in particular inhibit or prevent, the signalling that is mediated by IL-6, IL-6R, IL-6/IL-6R complex and/or gp130, (iii) to modulate the biological pathways in which IL-6, IL-6R, the IL6/IL-6R complex and/or gp130 are involved, and/or (iv) to modulate the biological mechanisms, responses and effects associated with such signalling or these pathways, or more generally capable of modulating (as defined herein) IL-6R or IL-6R mediated signalling via the same mechanism of action as M182.

[0301] Such biparatopic (or multiparatopic) polypeptides of the invention preferably comprise at least one amino acid sequence and/or Nanobody that is capable, upon binding to IL-6R, (i) to modulate, and in particular inhibit and/or prevent, binding of IL-6R to IL-6 and thus (ii) to modulate, and in particular inhibit or prevent, the signalling that is mediated by IL-6, IL-6R, IL-6/IL-6R complex and/or gp130, (iii) to modulate the biological pathways in which IL-6, IL-6R, the IL-6/IL-6R complex and/or gp130 are involved, and/or (iv) to modulate the biological mechanisms, responses and effects associated with such signalling or these pathways; as well as at least one further amino acid sequence and/or Nanobody that is capable, upon binding to IL-6R, (i) to modulate, and in particular inhibit and/or prevent, binding of the IL-6/IL-6R complex to gp130 and thus (ii) to modulate, and in particular inhibit or prevent, the signalling that is mediated by IL-6, IL-6R, IL-6/IL-6R complex and/or gp130, (iii) to modulate the biological pathways in which IL-6, IL-6R, the IL6/IL-6R complex and/or gp130 are involved, and/or (iv) to modulate the biological mechanisms, responses and effects associated with such signalling or these pathways, or more generally capable of modulating (as defined herein) IL-6R or IL-6R mediated signalling via the same mechanism of action as M182. Such biparatopic (or multiparatopic) polypeptides of the invention preferably comprise at least one amino acid sequence and/or Nanobody that is directed against an epitope that lies in, forms part of, or overlaps with (i.e. in the primary or tertiary structure) or is in close proximity to (i.e. in the primary or tertiary structure) to the IL-6 binding site on IL-6R (preferably, one or more of the 18 contact residues as described in Boulanger et al. 2003 (Science 300, 2101-2104) present in the extracellular 03 domain of the IL-6R, more preferably amino acid residues Phe229 and Phe279 present in the extracellular D3 domain of the IL-6R; for example, competitively with IL-6) and/or are capable of competing with IL-6 for binding to IL-6R, as well as at least one further amino acid sequence and/or Nanobody that is directed against an epitope that lies in, forms part of, or overlaps with (i.e. in the primary or tertiary structure) or is in close proximity to (i.e. in the primary or tertiary structure) to the M182 binding site on IL-6R (for example, competitively with M182) and/or that is capable of competing with M182 for binding to IL-6R. Generally, such biparatopic (or multiparatopic) polypeptides of the invention may be as further described herein, and the various preferred aspects of the invention as described herein also apply to these biparatopic (or multiparatopic) polypeptides of the invention (for example, these biparatopic and multiparatopic polypeptides of the invention may comprise suitable linkers; are preferably such that they can simultaneously bind the IL-6 binding site and the M182 binding site on IL-6R; and preferably comprise single variable domains and more preferably Nanobodies).

[0302] In another preferred, but non-limiting aspect, the biparatopic (or multiparatopic) polypeptides of the invention are at least directed against an epitope that lies in, forms part of, or overlaps with (i.e. in the primary or tertiary structure) or is in close proximity to (i.e. in the primary or tertiary structure) the M182 binding site on IL-6R (for example, competitively with M182) and/or are capable of competing with M182 for binding to IL-6R as well as against an epitope that lies in, forms part of, or overlaps with (i.e. in the primary or tertiary structure) or is in close proximity to (i.e. in the primary or tertiary structure) the gp130 binding site on IL-6R and/or the IL-6/IL-6R complex (for example, competitively with gp130) and/or are capable of competing with gp130 for binding to the IL-6/1′-6R complex. Again, the above biparatopic (or multiparatopic) polypeptides of the invention may be as further described herein, and the various preferred aspects of the invention as described herein also apply to these biparatopic (or multiparatopic) polypeptides of the invention (for example, these biparatopic and multiparatopic polypeptides of the invention may comprise suitable linkers; are preferably such that they can simultaneously bind the M182 binding site on IL-6R and the gp130 binding site on ft-6R and/or the IL-6/IL-6R complex; and preferably comprise single variable domains and more preferably Nanobodies).

[0303] In another preferred, but non-limiting aspect, the biparatopic (or multiparatopic) polypeptides of the invention are at least capable, upon binding to IL-6R, (i) to modulate, and in particular inhibit and/or prevent, binding of the IL-6/IL-6R complex to gp130 and thus (ii) to modulate, and in particular inhibit or prevent, the signalling that is mediated by IL-6, IL-6R, IL-6/IL-6R complex and/or gp130, (iii) to modulate the biological pathways in which IL-6, IL-6R, the IL6/IL-6R complex and/or gp130 are involved, and/or (iv) to modulate the biological mechanisms, responses and effects associated with such signalling or these pathways, or more generally capable of modulating (as defined herein) IL-6R or IL-6R mediated signalling via the same mechanism of action as M182.

[0304] Such biparatopic (or multiparatopic) polypeptides of the invention preferably comprise at least one amino acid sequence and/or Nanobody that is capable, upon binding to IL-6R, (i) to modulate, and in particular inhibit and/or prevent, binding of the IL-6/IL-6R complex to gp130 and thus (ii) to modulate, and in particular inhibit or prevent, the signalling that is mediated by IL-6, IL-6R, IL-6/IL-6R complex and/or gp130, (iii) to modulate the biological pathways in which IL-6, IL-6R, the IL6/IL-6R complex and/or gp130 are involved, and/or (iv) to modulate the biological mechanisms, responses and effects associated with such signalling or these pathways, or more generally capable of modulating (as defined herein) IL-6R or IL-6R mediated signalling via the same mechanism of action as M182; as well as at least one further amino acid sequence and/or Nanobody that is capable, upon binding to IL-6R, (i) to modulate, and in particular inhibit and/or prevent, binding of the IL-6/IL-6R complex to gp130 and thus (ii) to modulate, and in particular inhibit or prevent, the signalling that is mediated by IL-6, IL-6R, IL-6/IL-6R complex and/or gp130, (iii) to modulate the biological pathways in which IL-6, IL-6R, the IL6/IL-6R complex and/or gp130 are involved, and/or (iv) to modulate the biological mechanisms, responses and effects associated with such signalling or these pathways. Such biparatopic (or multiparatopic) polypeptides of the invention preferably comprise at least one amino acid sequence and/or Nanobody that is directed against an epitope that lies in, forms part of, or overlaps with (i.e. in the primary or tertiary structure) or is in close proximity to (i.e. in the primary or tertiary structure) to the M182 binding site on IL-6R (for example, competitively with M182) and/or are capable of competing with M182 for binding to IL-6R, as well as at least one further amino acid sequence and/or Nanobody that is directed against an epitope that lies in, forms part of, or overlaps with (i.e. in the primary or tertiary structure) or is in close proximity to (i.e. in the primary or tertiary structure) to the gp130 binding site on IL-6R and/or the IL-6/IL-6R complex (for example, competitively with gp130) and/or that is capable of competing with gp130 for binding to the IL-6/IL-6R complex. Generally, such biparatopic (or multiparatopic) polypeptides of the invention may be as further described herein, and the various preferred aspects of the invention as described herein also apply to these biparatopic (or multiparatopic) polypeptides of the invention (for example, these biparatopic and multiparatopic polypeptides of the invention may comprise suitable linkers; are preferably such that they can simultaneously bind the M182 binding site on IL-6R and the gp130 binding site on IL-6R and/or the IL-6/IL-6R complex; and preferably comprise single variable domains and more preferably Nanobodies).

[0305] In another preferred, but non-limiting aspect, the biparatopic (or multiparatopic) polypeptides of the invention are at least directed against an epitope that lies in, forms part of, or overlaps with (i.e. in the primary or tertiary structure) or is in close proximity to (i.e. in the primary or tertiary structure) the binding site for the reference IgG and/or the reference Fab on IL-6R (for example, competitively with the reference IgG and/or the reference Fab) and/or are capable of competing with the reference IgG and/or the reference Fab for binding to IL-6R as well as against an epitope that lies in, forms part of, or overlaps with (i.e. in the primary or tertiary structure) or is in close proximity to (i.e. in the primary or tertiary structure) the M182 binding site on IL-6R (for example, competitively with M182) and/or are capable of competing with M182 for binding to IL-6R. Again, the above biparatopic (or multiparatopic) polypeptides of the invention may be as further described herein, and the various preferred aspects of the invention as described herein also apply to these biparatopic (or multiparatopic) polypeptides of the invention (for example, these biparatopic and multiparatopic polypeptides of the invention may comprise suitable linkers; are preferably such that they can simultaneously bind the binding site for the reference IgG and/or the reference Fab and the M182 binding site on IL-6R; and preferably comprise single variable domains and more preferably Nanobodies).

[0306] In another preferred, but non-limiting aspect, the amino acid sequences and (in particular) polypeptides of the invention are biparatopic (or multiparatopic) and are at least capable, upon binding to IL-6R, (i) to modulate, and in particular inhibit and/or prevent, binding of IL-6R to IL-6 and/or binding of the IL-6/IL-6R complex to gp130 and thus (ii) to modulate, and in particular inhibit or prevent, the signalling that is mediated by IL-6, IL-6R, IL-6/IL-6R complex and/or gp130, (iii) to modulate the biological pathways in which IL-6, IL-6R, the IL6/IL-6R complex and/or gp130 are involved, and/or (iv) to modulate the biological mechanisms, responses and effects associated with such signalling or these pathways, or more generally capable of modulating (as defined herein) IL-6R or IL-6R mediated signalling via the same mechanism of action as M182 and/or the reference IgG and/or the reference Fab.

[0307] Such biparatopic (or multiparatopic) polypeptides of the invention preferably comprise at least one amino acid sequence and/or Nanobody that is capable, upon binding to IL-6R, (i) to modulate, and in particular inhibit and/or prevent, binding of IL-6R to IL-6 and thus (ii) to modulate, and in particular inhibit or prevent, the signalling that is mediated by IL-6, IL-6R, IL-6/IL-6R complex and/or gp130, (iii) to modulate the biological pathways in which IL-6, IL-6R, the IL6/IL-6R complex and/or gp130 are involved, and/or (iv) to modulate the biological mechanisms, responses and effects associated with such signalling or these pathways, or more generally capable of modulating (as defined herein) IL-6R or IL-6R mediated signalling via the same mechanism of action as the reference IgG and/or the reference Fab; as well as at least one further amino acid sequence and/or Nanobody that is capable, upon binding to IL-6R, (i) to modulate, and in particular inhibit and/or prevent, binding of the IL-6/IL-6R complex to gp130 and thus (ii) to modulate, and in particular inhibit or prevent, the signalling that is mediated by IL-6, IL-6R, IL-6/IL-6R complex and/or gp130, (iii) to modulate the biological pathways in which IL-6, IL-6R, the IL6/IL-6R complex and/or gp130 are involved, and/or (iv) to modulate the biological mechanisms, responses and effects associated with such signalling or these pathways, or more generally capable of modulating (as defined herein) IL-6R or IL-6R mediated signalling via the same mechanism of action as M182. Such biparatopic (or multiparatopic) polypeptides of the invention preferably comprise at least one amino acid sequence and/or Nanobody that is directed against an epitope that lies in, forms part of, or overlaps with (i.e. in the primary or tertiary structure) or is in close proximity to (i.e. in the primary or tertiary structure) to the binding site for the reference IgG and/or the reference Fab on IL-6R (for example, competitively with the reference IgG and/or the reference Fab) and/or that is capable of competing with the reference IgG and/or the reference Fab for binding to IL-6R, as well as at least one further amino acid sequence and/or Nanobody that is directed against an epitope that lies in, forms part of, or overlaps with (i.e. in the primary or tertiary structure) or is in close proximity to (i.e. in the primary or tertiary structure) to the M182 binding site on IL-6R (for example, competitively with M182) and/or that is capable of competing with M182 for binding to IL-6R. Generally, such biparatopic (or multiparatopic) polypeptides of the invention may be as further described herein, and the various preferred aspects of the invention as described herein also apply to these biparatopic (or multiparatopic) polypeptides of the invention (for example, these biparatopic and multiparatopic polypeptides of the invention may comprise suitable linkers; are preferably such that they can simultaneously bind the binding site for the reference IgG and/or the reference Fab and the M182 binding site on IL-6R; and preferably comprise single variable domains and more preferably Nanobodies).

[0308] In another preferred, but non-limiting aspect, the biparatopic (or multiparatopic) polypeptides of the invention are at least directed against an epitope that lies in, forms part of, or overlaps with (i.e. in the primary or tertiary structure) or is in close proximity to (i.e. in the primary or tertiary structure) the M182 binding site on IL-6R (for example, competitively with M182) and/or are capable of competing with M182 for binding to IL-6R as well as against an epitope that lies in, forms part of, or overlaps with (i.e. in the primary or tertiary structure) or is in close proximity to (i.e. in the primary or tertiary structure) the Tocilizumab (MRA) binding site on IL-6R (for example, competitively with Tocilizumab (MRA)) and/or are capable of competing with Tocilizumab (MRA) for binding to IL-6R. Again, the above biparatopic (or multiparatopic) polypeptides of the invention may be as further described herein, and the various preferred aspects of the invention as described herein also apply to these biparatopic (or multiparatopic) polypeptides of the invention (for example, these biparatopic and multiparatopic polypeptides of the invention may comprise suitable linkers; are preferably such that they can simultaneously bind the binding site for the M182 and the Tocilizumab (MRA) binding site on IL-6R; and preferably comprise single variable domains and more preferably Nanobodies).

[0309] In another preferred, but non-limiting aspect, the amino acid sequences and (in particular) polypeptides of the invention are biparatopic (or multiparatopic) and are at least capable, upon binding to IL-6R, (i) to modulate, and in particular inhibit and/or prevent, binding of IL-6R to IL-6 and/or binding of the IL-6/IL-6R complex to gp130 and thus (ii) to modulate, and in particular inhibit or prevent, the signalling that is mediated by IL-6, IL-6R, IL-6/IL-6R complex and/or gp130, (iii) to modulate the biological pathways in which IL-6, IL-6R, the IL6/IL-6R complex and/or gp130 are involved, and/or (iv) to modulate the biological mechanisms, responses and effects associated with such signalling or these pathways, or more generally capable of modulating (as defined herein) IL-6R or IL-6R mediated signalling via the same mechanism of action as Tocilizumab (MRA) and/or M182.

[0310] Such biparatopic (or multiparatopic) polypeptides of the invention preferably comprise at least one amino acid sequence and/or Nanobody that is capable, upon binding to IL-6R, (i) to modulate, and in particular inhibit and/or prevent, binding of the IL-6/IL-6R complex to gp130 and thus (ii) to modulate, and in particular inhibit or prevent, the signalling that is mediated by IL-6, IL-6R, IL-6/IL-6R complex and/or gp130, (iii) to modulate the biological pathways in which IL-6, IL-6R, the IL6/IL-6R complex and/or gp130 are involved, and/or (iv) to modulate the biological mechanisms, responses and effects associated with such signalling or these pathways, or more generally capable of modulating (as defined herein) IL-6R or IL-6R mediated signalling via the same mechanism of action as M182; as well as at least one further amino acid sequence and/or Nanobody that is capable, upon binding to IL-6R, (i) to modulate, and in particular inhibit and/or prevent, binding of IL-6R to IL-6 and thus (ii) to modulate, and in particular inhibit or prevent, the signalling that is mediated by IL-6, IL-6R, IL-6/IL-6R complex and/or gp130, (iii) to modulate the biological pathways in which IL-6, IL-6R, the IL6/IL-6R complex and/or gp130 are involved, and/or (iv) to modulate the biological mechanisms, responses and effects associated with such signalling or these pathways, or more generally capable of modulating (as defined herein) IL-6R or IL-6R mediated signalling via the same mechanism of action as Tocilizumab (MRA). Such biparatopic (or multiparatopic) polypeptides of the invention preferably comprise at least one amino acid sequence and/or Nanobody that is directed against an epitope that lies in, forms part of, or overlaps with (i.e. in the primary or tertiary structure) or is in close proximity to (i.e. in the primary or tertiary structure) to the M182 binding site on IL-6R (for example, competitively with M182) and/or are capable of competing with M182 for binding to IL-6R, as well as at least one further amino acid sequence and/or Nanobody that is directed against an epitope that lies in, forms part of, or overlaps with (i.e. in the primary or tertiary structure) or is in close proximity to (i.e. in the primary or tertiary structure) to the Tocilizumab (MRA) binding site on IL-6R (for example, competitively with Tocilizumab (MRA)) and/or that is capable of competing with Tocilizumab (MRA) for binding to IL-6R. Generally, such biparatopic (or multiparatopic) polypeptides of the invention may be as further described herein, and the various preferred aspects of the invention as described herein also apply to these biparatopic (or multiparatopic) polypeptides of the invention (for example, these biparatopic and multiparatopic polypeptides of the invention may comprise suitable linkers; are preferably such that they can simultaneously bind the M182 binding site and the Tocilizumab (MRA) binding site on IL-6R; and preferably comprise single variable domains and more preferably Nanobodies).

[0311] In another preferred, but non-limiting aspect, the biparatopic (or multiparatopic) polypeptides of the invention may have both paratopes directed against an epitope that lies in, forms part of, or overlaps with (i.e. in the primary or tertiary structure) or is in close proximity to (i.e. in the primary or tertiary structure) the M182 binding site on IL-6R (for example, competitively with M182) and/or both capable of competing with M182 for binding to IL-6R.

[0312] Again, the above biparatopic (or multiparatopic) polypeptides of the invention may be as further described herein, and the various preferred aspects of the invention as described herein also apply to these biparatopic (or multiparatopic) polypeptides of the invention (for example, these biparatopic and multiparatopic polypeptides of the invention may comprise suitable linkers; are preferably such that they can simultaneously bind both binding sites on IL-6R; and preferably comprise single variable domains and more preferably Nanobodies).

[0313] In another preferred, but non-limiting aspect, the amino acid sequences and (in particular) polypeptides of the invention are biparatopic (or multiparatopic) and are at least capable, upon binding to IL-6R, (i) to modulate, and in particular inhibit and/or prevent, binding of the IL-6/IL-6R complex to gp130 and thus (ii) to modulate, and in particular inhibit or prevent, the signalling that is mediated by IL-6, IL-6R, IL-6/IL-6R complex and/or gp130, (iii) to modulate the biological pathways in which IL-6, IL-6R, the IL6/IL-6R complex and/or gp130 are involved, and/or (iv) to modulate the biological mechanisms, responses and effects associated with such signalling or these pathways, or more generally capable of modulating (as defined herein) IL-6R or IL-6R mediated signalling via the same mechanism of action as M182.

[0314] Such biparatopic (or multiparatopic) polypeptides of the invention preferably comprise at least two amino acid sequences and/or Nanobodies that are capable, upon binding to IL-6R, (i) to modulate, and in particular inhibit and/or prevent, binding of the IL-6/IL-6R complex to gp130 and thus (ii) to modulate, and in particular inhibit or prevent, the signalling that is mediated by IL-6, IL-6R, IL-6/IL-6R complex and/or gp130, (iii) to modulate the biological pathways in which IL-6, IL-6R, the IL6/IL-6R complex and/or gp130 are involved, and/or (iv) to modulate the biological mechanisms, responses and effects associated with such signalling or these pathways, or more generally capable of modulating (as defined herein) IL-6R or IL-6R mediated signalling via the same mechanism of action as M182. Such biparatopic (or multiparatopic) polypeptides of the invention preferably comprise at least two amino acid sequences and/or Nanobodies that are directed against an epitope that lies in, forms part of, or overlaps with (i.e. in the primary or tertiary structure) or is in close proximity to (i.e. in the primary or tertiary structure) to the M182 binding site on IL-6R (for example, competitively with M182) and/or that are capable of competing with M182 for binding to IL-6R. Generally, such biparatopic (or multiparatopic) polypeptides of the invention may be as further described herein, and the various preferred aspects of the invention as described herein also apply to these biparatopic (or multiparatopic) polypeptides of the invention (for example, these biparatopic and multiparatopic polypeptides of the invention may comprise suitable linkers; are preferably such that they can simultaneously bind the M182 binding site on IL-6R; and preferably comprise single variable domains and more preferably Nanobodies).

[0315] In another preferred, but non-limiting aspect, the biparatopic (or multiparatopic) polypeptides of the invention are at least directed against an epitope that lies in, forms part of, or overlaps with (i.e. in the primary or tertiary structure) or is in close proximity to (i.e. in the primary or tertiary structure) the IL-6 binding site on IL-6R (preferably, one or more of the 18 contact residues as described in Boulanger et al. 2003 (Science 300, 2101-2104) present in the extracellular 03 domain of the IL-6R, more preferably amino acid residues Phe229 and Phe279 present in the extracellular D3 domain of the IL-6R; for example, competitively with IL-6) and/or are capable of competing with IL-6 for binding to IL-6R as well as against an epitope that lies in, forms part of, or overlaps with (i.e. in the primary or tertiary structure) or is in close proximity to (i.e. in the primary or tertiary structure) the BN-12 binding site on IL-6R (for example, competitively with BN-12) and/or are capable of competing with BN-12 for binding to IL-6R. Again, the above biparatopic (or multiparatopic) polypeptides of the invention may be as further described herein, and the various preferred aspects of the invention as described herein also apply to these biparatopic (or multiparatopic) polypeptides of the invention (for example, these biparatopic and multiparatopic polypeptides of the invention may comprise suitable linkers; are preferably such that they can simultaneously bind the IL-6 binding site and the BN-12 binding site on IL-6R; and preferably comprise single variable domains and more preferably Nanobodies).

[0316] In another preferred, but non-limiting aspect, the amino acid sequences and (in particular) polypeptides of the invention are biparatopic (or multiparatopic) and are at least capable, upon binding to IL-6R, (1) to modulate, and in particular inhibit and/or prevent binding of IL-6R to IL-6 and/or binding of the IL-6/IL-6R complex to gp130 and thus (ii) to modulate, and in particular inhibit or prevent, the signalling that is mediated by IL-6, IL-6R, IL-6/IL-6R complex and/or gp130, (iii) to modulate the biological pathways in which IL-6, IL-6R, the IL6/IL-6R complex and/or gp130 are involved, and/or (iv) to modulate the biological mechanisms, responses and effects associated with such signalling or these pathways.

[0317] Such biparatopic (or multiparatopic) polypeptides of the invention preferably comprise at least one amino acid sequence and/or Nanobody that is capable, upon binding to IL-6R, (i) to modulate, and in particular inhibit and/or prevent binding of IL-6R to IL-6 and/or binding of IL-6R to IL-6 and thus (ii) to modulate, and in particular inhibit or prevent, the signalling that is mediated by IL-6, IL-6R, IL-6/IL-6R complex and/or gp130, (iii) to modulate the biological pathways in which IL-6, IL-6R, the IL6/IL-6R complex and/or gp130 are involved, and/or (iv) to modulate the biological mechanisms, responses and effects associated with such signalling or these pathways; as well as at least one further amino acid sequence and/or Nanobody that is capable, upon binding to IL-6R, (i) to modulate, and in particular inhibit and/or prevent binding of IL-6R to IL-6 and/or binding of the IL-6/IL-6R complex to gp130 and thus (ii) to modulate, and in particular inhibit or prevent, the signalling that is mediated by IL-6, IL-6R, IL-6/IL-6R complex and/or gp130, (iii) to modulate the biological pathways in which IL-6, IL-6R, the IL6/IL-6R complex and/or gp130 are involved, and/or (iv) to modulate the biological mechanisms, responses and effects associated with such signalling or these pathways. Such biparatopic (or multiparatopic) polypeptides of the invention preferably comprise at least one amino acid sequence and/or Nanobody that is directed against an epitope that lies in, forms part of, or overlaps with (i.e. in the primary or tertiary structure) or is in close proximity to (i.e. in the primary or tertiary structure) to the IL-6 binding site on IL-6R (preferably, one or more of the 18 contact residues as described in Boulanger et al. 2003 (Science 300, 2101-2104) present in the extracellular D3 domain of the IL-6R, more preferably amino acid residues Phe229 and Phe279 present in the extracellular D3 domain of the IL-6R; for example, competitively with IL-6) and/or are capable of competing with IL-6 for binding to IL-6R, as well as at least one further amino add sequence and/or Nanobody that is directed against an epitope that lies in, forms part of, or overlaps with (i.e. in the primary or tertiary structure) or is in close proximity to (i.e. in the primary or tertiary structure) to the BN-12 binding site on IL-6R (for example, competitively with BN-12) and/or that is capable of competing with BN-12 for binding to IL-6R. Generally, such biparatopic (or multiparatopic) polypeptides of the invention may be as further described herein, and the various preferred aspects of the invention as described herein also apply to these biparatopic (or multiparatopic) polypeptides of the invention (for example, these biparatopic and multiparatopic polypeptides of the invention may comprise suitable linkers; are preferably such that they can simultaneously bind the IL-6 binding site and the BN-12 binding site on IL-6R; and preferably comprise single variable domains and more preferably Nanobodies).

[0318] In another preferred, but non-limiting aspect, the biparatopic (or multiparatopic) polypeptides of the invention are at least directed against an epitope that lies in, forms part of, or overlaps with (i.e. in the primary or tertiary structure) or is in close proximity to (i.e. in the primary or tertiary structure) the BN-12 binding site on IL-6R (for example, competitively with BN-12) and/or are capable of competing with BN-12 for binding to IL-6R as well as against an epitope that lies in, forms part of, or overlaps with (i.e. in the primary or tertiary structure) or is in close proximity to (i.e. in the primary or tertiary structure) the gp130 binding site on IL-6R and/or the IL-6/IL-6R complex (for example, competitively with gp130) and/or are capable of competing with gp130 for binding to the IL-6/IL-6R complex. Again, the above biparatopic (or multiparatopic) polypeptides of the invention may be as further described herein, and the various preferred aspects of the invention as described herein also apply to these biparatopic (or multiparatopic) polypeptides of the invention (for example, these biparatopic and multiparatopic polypeptides of the invention may comprise suitable linkers; are preferably such that they can simultaneously bind the BN-12 binding site on IL-6R and the gp130 binding site on IL-6R and/or the IL-6/IL-6R complex; and preferably comprise single variable domains and more preferably Nanobodies).

[0319] In another preferred, but non-limiting aspect, the amino acid sequences and (in particular) polypeptides of the invention are biparatopic (or multiparatopic) and are at least capable, upon binding to IL-6R, (i) to modulate, and in particular inhibit and/or prevent binding of IL-6R to IL-6 and/or binding of the IL-6/IL-6R complex to gp130 and thus (ii) to modulate, and in particular inhibit or prevent, the signalling that is mediated by IL-6, IL-6R, IL-6/IL-6R complex and/or gp130, (iii) to modulate the biological pathways in which IL-6, IL-6R, the IL6/IL-6R complex and/or gp130 are involved, and/or (iv) to modulate the biological mechanisms, responses and effects associated with such signalling or these pathways.

[0320] Such biparatopic (or multiparatopic) polypeptides of the invention preferably comprise at least one amino acid sequence and/or Nanobody that is capable, upon binding to IL-6R, (i) to modulate, and in particular inhibit and/or prevent binding of IL-6R to IL-6 and/or binding of the IL-6/IL-6R complex to gp130 and thus (ii) to modulate, and in particular inhibit or prevent the signalling that is mediated by IL-6, IL-6R, IL-6/IL-6R complex and/or gp130, (iii) to modulate the biological pathways in which IL-6, IL-6R, the IL6/IL-6R complex and/or gp130 are involved, and/or (iv) to modulate the biological mechanisms, responses and effects associated with such signalling or these pathways; as well as at least one further amino acid sequence and/or Nanobody that is capable, upon binding to IL-6R, (i) to modulate, and in particular inhibit and/or prevent, binding of the IL-6/IL-6R complex to gp130 and thus (ii) to modulate, and in particular inhibit or prevent, the signalling that is mediated by IL-6, IL-6R, IL-6/IL-6R complex and/or gp130, (iii) to modulate the biological pathways in which IL-6, IL-6R, the IL6/IL-6R complex and/or gp130 are involved, and/or (iv) to modulate the biological mechanisms, responses and effects associated with such signalling or these pathways. Such biparatopic (or multiparatopic) polypeptides of the invention preferably comprise at least one amino acid sequence and/or Nanobody that is directed against an epitope that lies in, forms part of, or overlaps with (i.e. in the primary or tertiary structure) or is in close proximity to (i.e. in the primary or tertiary structure) to the BN-12 binding site on IL-6R (for example, competitively with BN-12) and/or are capable of competing with BN-12 for binding to IL-6R, as well as at least one further amino acid sequence and/or Nanobody that is directed against an epitope that lies in, forms part of, or overlaps with (i.e. in the primary or tertiary structure) or is in close proximity to (i.e. in the primary or tertiary structure) to the gp130 binding site on IL-6R the IL-6/IL-6R complex (for example, competitively with gp130) and/or that is capable of competing with gp130 for binding to the IL-6/IL-6R complex. Generally, such biparatopic (or multiparatopic) polypeptides of the invention may be as further described herein, and the various preferred aspects of the invention as described herein also apply to these biparatopic (or multiparatopic) polypeptides of the invention (for example, these biparatopic and multiparatopic polypeptides of the invention may comprise suitable linkers; are preferably such that they can simultaneously bind the BN-12 binding site on IL-6R and the gp130 binding site on IL-6R and/or the IL-6/IL-6R complex; and preferably comprise single variable domains and more preferably Nanobodies).

[0321] In another preferred, but non-limiting aspect, the biparatopic (or multiparatopic) polypeptides of the invention are at least directed against an epitope that lies in, forms part of, or overlaps with (i.e. in the primary or tertiary structure) or is in close proximity to (i.e. in the primary or tertiary structure) the binding site for the reference IgG and/or the reference Fab on IL-6R (for example, competitively with the reference IgG and/or the reference Fab) and/or are capable of competing with the reference IgG and/or the reference Fab for binding to IL-6R as well as against an epitope that lies in, forms part of, or overlaps with (i.e. in the primary or tertiary structure) or is in close proximity to (i.e. in the primary or tertiary structure) the BN-12 binding site on IL-6R (for example, competitively with BN-12) and/or are capable of competing with BN-12 for binding to IL-6R. Again, the above biparatopic (or multiparatopic) polypeptides of the invention may be as further described herein, and the various preferred aspects of the invention as described herein also apply to these biparatopic (or multiparatopic) polypeptides of the invention (for example, these biparatopic and multiparatopic polypeptides of the invention may comprise suitable linkers; are preferably such that they can simultaneously bind the binding site for the reference IgG and/or the reference Fab and the BN-12 binding site on IL-6R; and preferably comprise single variable domains and more preferably Nanobodies).

[0322] In another preferred, but non-limiting aspect, the biparatopic (or multiparatopic) polypeptides of the invention are at least capable, upon binding to IL-6R, (i) to modulate, and in particular inhibit and/or prevent, binding of IL-6R to IL-6 and/or binding of the IL-6/IL-6R complex to gp130 and thus (ii) to modulate, and in particular inhibit or prevent, the signalling that is mediated by IL-6, IL-6R, IL-6/IL-6R complex and/or gp130, (iii) to modulate the biological pathways in which IL-6, IL-6R, the IL6/IL-6R complex and/or gp130 are involved, and/or (iv) to modulate the biological mechanisms, responses and effects associated with such signalling or these pathways, or more generally capable of modulating (as defined herein) IL-6R or IL-6R mediated signalling via the same mechanism of action as the reference IgG and/or the reference Fab.

[0323] Such biparatopic (or multiparatopic) polypeptides of the invention preferably comprise at least one amino acid sequence and/or Nanobody that is capable, upon binding to IL-6R, (1) to modulate, and in particular inhibit and/or prevent, binding of IL-6R to IL-6 and thus (ii) to modulate, and in particular inhibit or prevent, the signalling that is mediated by IL-6, IL-6R, IL-6/IL-6R complex and/or gp130, (iii) to modulate the biological pathways in which IL-6, IL-6R, the IL6/IL-6R complex and/or gp130 are involved, and/or (iv) to modulate the biological mechanisms, responses and effects associated with such signalling or these pathways, or more generally capable of modulating (as defined herein) IL-6R or IL-6R mediated signalling via the same mechanism of action as the reference IgG and/or the reference Fab; as well as at least one further amino acid sequence and/or Nanobody that is capable, upon binding to IL-6R, (i) to modulate, and in particular inhibit and/or prevent binding of IL-6R to IL-6 and/or binding of the IL-6/IL-6R complex to gp130 and thus (ii) to modulate, and in particular inhibit or prevent, the signalling that is mediated by IL-6, IL-6R, IL-6/IL-6R complex and/or gp130, (iii) to modulate the biological pathways in which IL-6, IL-6R, the IL6/IL-6R complex and/or gp130 are involved, and/or (iv) to modulate the biological mechanisms, responses and effects associated with such signalling or these pathways. Such biparatopic (or multiparatopic) polypeptides of the invention preferably comprise at least one amino acid sequence and/or Nanobody that is directed against an epitope that lies in, forms part of, or overlaps with (i.e. in the primary or tertiary structure) or is in close proximity to (i.e. in the primary or tertiary structure) to the binding site for the reference IgG and/or the reference Fab on IL-6R (for example, competitively with the reference IgG and/or the reference Fab) and/or are capable of competing with the reference IgG and/or the reference Fab for binding to IL-6R, as well as at least one further amino acid sequence and/or Nanobody of the invention that is directed against an epitope that lies in, forms part of, or overlaps with (i.e. in the primary or tertiary structure) or is in close proximity to (i.e. in the primary or tertiary structure) to the BN-12 binding site on IL-6R (for example, competitively with BN-12) and/or that is capable of competing with BN-12 for binding to IL-6R. Generally, such biparatopic (or multiparatopic) polypeptides of the invention may be as further described herein, and the various preferred aspects of the invention as described herein also apply to these biparatopic (or multiparatopic) polypeptides of the invention (for example, these biparatopic and multiparatopic polypeptides of the invention may comprise suitable linkers; are preferably such that they can simultaneously bind the binding site for the reference IgG and/or the reference Fab and the BN-1 binding site on IL-6R; and preferably comprise single variable domains and more preferably Nanobodies).

[0324] In another preferred, but non-limiting aspect, the biparatopic (or multiparatopic) polypeptides of the invention are at least directed against an epitope that lies in, forms part of, or overlaps with (i.e. in the primary or tertiary structure) or is in close proximity to (i.e. in the primary or tertiary structure) the BN-12 binding site on IL-6R (for example, competitively with BN-12) and/or are capable of competing with BN-12 for binding to IL-6R as well as against an epitope that lies in, forms part of, or overlaps with (i.e. in the primary or tertiary structure) or is in close proximity to (i.e. in the primary or tertiary structure) the Tocilizumab (MRA) binding site on IL-6R (for example, competitively with Tocilizumab (MRA)) and/or are capable of competing with Tocilizumab (MRA) for binding to IL-6R. Again, the above biparatopic (or multiparatopic) polypeptides of the invention may be as further described herein, and the various preferred aspects of the invention as described herein also apply to these biparatopic (or multiparatopic) polypeptides of the invention (for example, these biparatopic and multiparatopic polypeptides of the invention may comprise suitable linkers; are preferably such that they can simultaneously bind the binding site for the BN-12 and the Tocilizumab (MRA) binding site on IL-6R; and preferably comprise single variable domains and more preferably Nanobodies).

[0325] In another preferred, but non-limiting aspect, the amino acid sequences and (in particular) polypeptides of the invention are biparatopic (or multiparatopic) and are at least capable, upon binding to IL-6R, (i) to modulate, and in particular inhibit and/or prevent, binding of IL-6R to IL-6 and/or binding of the IL-6/IL-6R complex to gp130 and thus (ii) to modulate, and in particular inhibit or prevent, the signalling that is mediated by IL-6, IL-6R, IL-6/IL-6R complex and/or gp130, (iii) to modulate the biological pathways in which IL-6, IL-6R, the IL6/IL-6R complex and/or gp130 are involved, and/or (iv) to modulate the biological mechanisms, responses and effects associated with such signalling or these pathways, or more generally capable of modulating (as defined herein) IL-6R or IL-6R mediated signalling via the same mechanism of action as Tocilizumab (MRA).

[0326] Such biparatopic (or multiparatopic) polypeptides of the invention preferably comprise at least one amino acid sequence and/or Nanobody that is capable, upon binding to IL-6R, (i) to modulate, and in particular inhibit and/or prevent binding of IL-6R to IL-6 and/or binding of the IL-6/IL-6R complex to gp130 and thus (ii) to modulate, and in particular inhibit or prevent, the signalling that is mediated by IL-6, IL-6R, IL-6/IL-6R complex and/or gp130, (iii) to modulate the biological pathways in which IL-6, IL-6R, the IL6/IL-6R complex and/or gp130 are involved, and/or (iv) to modulate the biological mechanisms, responses and effects associated with such signalling or these pathways; as well as at least one further amino acid sequence and/or Nanobody that is capable, upon binding to IL-6R, (i) to modulate, and in particular inhibit and/or prevent, binding of IL-6R to IL-6 and thus (ii) to modulate, and in particular inhibit or prevent, the signalling that is mediated by IL-6, IL-6R, IL-6/IL-6R complex and/or gp130, (iii) to modulate the biological pathways in which IL-6, IL-6R, the IL6/IL-6R complex and/or gp130 are involved, and/or (iv) to modulate the biological mechanisms, responses and effects associated with such signalling or these pathways, or more generally capable of modulating (as defined herein) IL-6R or IL-6R mediated signalling via the same mechanism of action as Tocilizumab (MRA). Such biparatopic (or multiparatopic) polypeptides of the invention preferably comprise at least one amino acid sequence and/or Nanobody that is directed against an epitope that lies in, forms part of, or overlaps with (i.e. in the primary or tertiary structure) or is in close proximity to (i.e. in the primary or tertiary structure) to the BN-12 binding site on IL-6R (for example, competitively with BN-12) and/or are capable of competing with BN-12 for binding to IL-6R, as well as at least one further amino acid sequence and/or Nanobody that is directed against an epitope that lies in, forms part of, or overlaps with (i.e. in the primary or tertiary structure) or is in close proximity to (i.e. in the primary or tertiary structure) to the Tocilizumab (MRA) binding site on IL-6R (for example, competitively with Tocilizumab (MRA)) and/or that is capable of competing with Tocilizumab (MRA) for binding to IL-6R. Generally, such biparatopic (or multiparatopic) polypeptides of the invention may be as further described herein, and the various preferred aspects of the invention as described herein also apply to these biparatopic (or multiparatopic) polypeptides of the invention (for example, these biparatopic and multiparatopic polypeptides of the invention may comprise suitable linkers; are preferably such that they can simultaneously bind the BN-12 binding site and the Tocilizumab (MRA) binding site on IL-6R; and preferably comprise single variable domains and more preferably Nanobodies).

[0327] In another preferred, but non-limiting aspect, the biparatopic (or multiparatopic) polypeptides of the invention are at least directed against an epitope that lies in, forms part of, or overlaps with (i.e. in the primary or tertiary structure) or is in close proximity to (i.e. in the primary or tertiary structure) the M182 binding site on IL-6R (for example, competitively with M182) and/or are capable of competing with M182 for binding to IL-6R as well as against an epitope that lies in, forms part of, or overlaps with (i.e. in the primary or tertiary structure) or is in close proximity to (i.e. in the primary or tertiary structure) the BN-12 binding site on IL-6R (for example, competitively with BN-12) and/or are capable of competing with BN-12 for binding to IL-6R. Again, the above biparatopic (or multiparatopic) polypeptides of the invention may be as further described herein, and the various preferred aspects of the invention as described herein also apply to these biparatopic (or multiparatopic) polypeptides of the invention (for example, these biparatopic and multiparatopic polypeptides of the invention may comprise suitable linkers; are preferably such that they can simultaneously bind the binding site for the M182 and the BN-12 binding site on IL-6R; and preferably comprise single variable domains and more preferably Nanobodies).

[0328] In another preferred, but non-limiting aspect, the amino acid sequences and (in particular) polypeptides of the invention are biparatopic (or multiparatopic) and are at least capable, upon binding to IL-6R, (1) to modulate, and in particular inhibit and/or prevent, binding of IL-6R to IL-6 and/or binding of the IL-6/IL-6R complex to gp130 and thus (ii) to modulate, and in particular inhibit or prevent, the signalling that is mediated by IL-6, IL-6R, IL-6/IL-6R complex and/or gp130, (iii) to modulate the biological pathways in which IL-6, IL-6R, the IL6/IL-6R complex and/or gp130 are involved, and/or (iv) to modulate the biological mechanisms, responses and effects associated with such signalling or these pathways, or more generally capable of modulating (as defined herein) IL-6R or IL-6R mediated signalling via the same mechanism of action as M182.

[0329] Such biparatopic (or multiparatopic) polypeptides of the invention preferably comprise at least one amino acid sequence and/or Nanobody that is capable, upon binding to IL-6R, (i) to modulate, and in particular inhibit and/or prevent, binding of the IL-6/IL-6R complex to gp130 and thus (ii) to modulate, and in particular inhibit or prevent, the signalling that is mediated by IL-6, IL-6R, IL-6/IL-6R complex and/or gp130, (iii) to modulate the biological pathways in which IL-6, IL-6R, the IL6/IL-6R complex and/or gp130 are involved, and/or (iv) to modulate the biological mechanisms, responses and effects associated with such signalling or these pathways, or more generally capable of modulating (as defined herein) IL-6R or IL-6R mediated signalling via the same mechanism of action as M182; as well as at least one further amino acid sequence and/or Nanobody that is capable, upon binding to IL-6R, (i) to modulate, and in particular inhibit and/or prevent, binding of IL-6R to IL-6 and/or binding of the IL-6/IL-6R complex to gp130 and thus (ii) to modulate, and in particular inhibit or prevent, the signalling that is mediated by IL-6, IL-6R, IL-6/IL-6R complex and/or gp130, (iii) to modulate the biological pathways in which IL-6, IL-6R, the IL6/IL-6R complex and/or gp130 are involved, and/or (iv) to modulate the biological mechanisms, responses and effects associated with such signalling or these pathways. Such biparatopic (or multiparatopic) polypeptides of the invention preferably comprise at least one amino acid sequence and/or Nanobody that is directed against an epitope that lies in, forms part of, or overlaps with (i.e. in the primary or tertiary structure) or is in close proximity to (i.e. in the primary or tertiary structure) to the M182 binding site on IL-6R (for example, competitively with M182) and/or are capable of competing with M182 for binding to IL-6R, as well as at least one further amino acid sequence and/or Nanobody that is directed against an epitope that lies in, forms part of, or overlaps with (i.e. in the primary or tertiary structure) or is in close proximity to (i.e. in the primary or tertiary structure) to the BN-12 binding site on IL-6R (for example, competitively with BN-12) and/or that is capable of competing with BN-12 for binding to IL-6R. Generally, such biparatopic (or multiparatopic) polypeptides of the invention may be as further described herein, and the various preferred aspects of the invention as described herein also apply to these biparatopic (or multiparatopic) polypeptides of the invention (for example, these biparatopic and multiparatopic polypeptides of the invention may comprise suitable linkers; are preferably such that they can simultaneously bind the M182 binding site and the BN-12 binding site on IL-6R; and preferably comprise single variable domains and more preferably Nanobodies).

[0330] In another preferred, but non-limiting aspect, the biparatopic (or multiparatopic) polypeptides of the invention may have both paratopes directed against an epitope that lies in, forms part of, or overlaps with (i.e. in the primary or tertiary structure) or is in close proximity to (i.e. in the primary or tertiary structure) the BN-12 binding site on IL-6R (for example, competitively with BN-12) and/or both capable of competing with BN-12 for binding to IL-6R.

[0331] Again, the above biparatopic (or multiparatopic) polypeptides of the invention may be as further described herein, and the various preferred aspects of the invention as described herein also apply to these biparatopic (or multiparatopic) polypeptides of the invention (for example, these biparatopic and multiparatopic polypeptides of the invention may comprise suitable linkers; are preferably such that they can simultaneously bind both binding sites on IL-6R; and preferably comprise single variable domains and more preferably Nanobodies).

[0332] In another preferred, but non-limiting aspect, the biparatopic (or multiparatopic) polypeptides of the invention are at least capable, upon binding to IL-6R, (1) to modulate, and in particular inhibit and/or prevent binding of IL-6R to IL-6 and/or binding of the IL-6/IL-6R complex to gp130 and thus (ii) to modulate, and in particular inhibit or prevent, the signalling that is mediated by IL-6, IL-6R, IL-6/IL-6R complex and/or gp130, (iii) to modulate the biological pathways in which IL-6, IL-6R, the IL6/IL-6R complex and/or gp130 are involved, and/or (iv) to modulate the biological mechanisms, responses and effects associated with such signalling or these pathways.

[0333] Such biparatopic (or multiparatopic) polypeptides of the invention preferably comprise at least two amino acid sequences and/or Nanobodies that are capable, upon binding to IL-6R, (i) to modulate, and in particular inhibit and/or prevent binding of IL-6R to IL-6 and/or binding of the IL-6/IL-6R complex to gp130 and thus (ii) to modulate, and in particular inhibit or prevent, the signalling that is mediated by IL-6, IL-6R, IL-6/IL-6R complex and/or gp130, (iii) to modulate the biological pathways in which IL-6, IL-6R, the IL6/IL-6R complex and/or gp130 are involved, and/or (iv) to modulate the biological mechanisms, responses and effects associated with such signalling or these pathways. Such biparatopic (or multiparatopic) polypeptides of the invention preferably comprise at least two amino acid sequences and/or Nanobodies that are directed against an epitope that lies in, forms part of, or overlaps with (i.e. in the primary or tertiary structure) or is in close proximity to (i.e. in the primary or tertiary structure) to the BN-12 binding site on IL-6R (for example, competitively with BN-12) and/or that are capable of competing with BN-12 for binding to IL-6R. Generally, such biparatopic (or multiparatopic) polypeptides of the invention may be as further described herein, and the various preferred aspects of the invention as described herein also apply to these biparatopic (or multiparatopic) polypeptides of the invention (for example, these biparatopic and multiparatopic polypeptides of the invention may comprise suitable linkers; are preferably such that they can simultaneously bind both binding site on IL-6R; and preferably comprise single variable domains and more preferably Nanobodies).

[0334] In the context of the present invention, for amino acid sequences and/or Nanobodies described above (and/or polypeptides comprising the same) that are directed against an epitope that lies in, forms part of, or overlaps with (i.e. in the primary or tertiary structure) or is in close proximity to (i.e. in the primary or tertiary structure) the IL-6 binding site on IL-6R (for example, competitively with IL-6) and/or that are capable of competing with IL-6 for binding to IL-6R, the term “modulating the interaction between IL-6R and IL-6”, “modulating the binding of IL-6R to IL-6” and/or “inhibiting and/or preventing binding of IL-6R to IL-6” means binding to IL-6R in such a way that the formation of the IL-6/IL-6R complex is inhibited or affected (e.g. fully or partially disrupted) in such a way that the binding of IL-6 to—e.g. its affinity for—IL-6R is reduced (or reversely, that the binding of IL-6R to—e.g. its affinity for—IL-6 is reduced), so that the signalling, pathway(s) and/or mechanism(s) induced/mediated by the binding of IL-6 to IL-6R is modulated (e.g. reduced) compared to the signalling, pathway(s) and/or mechanism(s) induced/mediated by the binding of IL-6 to IL-6R without the presence of the amino acid sequence and/or Nanobody described above (and/or polypeptide comprising the same).

[0335] Preferred biparatopic polypeptides of the invention are selected from SEQ ID NO's: 828-963

[0336] In the context of the present invention, for amino acid sequences and/or Nanobodies described above (and/or polypeptides comprising the same) that are directed against an epitope that lies in, forms part of, or overlaps with (i.e. in the primary or tertiary structure) or is in close proximity to (i.e. in the primary or tertiary structure) the IL-6 binding site on IL-6R (for example, competitively with IL-6) and/or that are capable of competing with IL-6 for binding to IL-6R, the term “modulating the interaction between IL-6/IL-6R complex and gp130”, “modulating binding of the IL-6/IL-6R complex to gp130” and/or “inhibiting and/or preventing binding of the IL-6/IL-6R complex to gp130” means binding to IL-6R (i.e. as such or as present in the IL-6/IL-6R complex) in such a way that the formation of the IL-6/IL-6R complex is inhibited or affected (e.g. fully or partially disrupted) in such a way that the binding of the complex to—e.g. its affinity for—gp130 is reduced (or reversely, that the binding of gp 130 to—e.g. its affinity for—the complex is reduced), so that the signalling, pathway(s) and/or mechanism(s) induced/mediated by the binding of the complex to gp130 is modulated (e.g. reduced) compared to the formation of the complex and its binding to gp130 without the presence of the amino acid sequence and/or Nanobody described above (and/or polypeptide comprising the same).

[0337] In the context of the present invention, for amino acid sequences and/or Nanobodies described above (and/or polypeptides comprising the same) that are directed against an epitope that lies in, forms part of, or overlaps with (i.e. in the primary or tertiary structure) or is in close proximity to (i.e. in the primary or tertiary structure) the gp130 binding site on IL-6R and/or the IL-6/IL-6R complex (for example, competitively with gp130); and/or are capable of competing with gp130 for binding to the IL-6/IL-6R complex, the term “modulating the interaction between IL-6R and IL-6”, “modulating the binding of IL-6R to (L-6” and/or “inhibiting and/or preventing binding of IL-6R to IL-6” means binding to IL-6R in such a way that the formation of the IL-6/IL-6R complex is inhibited or affected (e.g. fully or partially disrupted) in such a way that the binding of IL-6 to—e.g. its affinity for—IL-6R is reduced (or reversely, that the binding of IL-6R to—e.g. its affinity for—IL-6 is reduced), so that the signalling, pathway(s) and/or mechanism(s) induced/mediated by the binding of IL-6 to IL-6R is modulated (e.g. reduced) compared to the signalling, pathway(s) and/or mechanism(s) induced/mediated by the binding of IL-6 to IL-6R without the presence of the amino acid sequence and/or Nanobody described above (and/or polypeptide comprising the same).

[0338] In the context of the present invention, for amino acid sequences and/or Nanobodies described above (and/or polypeptides comprising the same) that are directed against an epitope that lies in, forms part of, or overlaps with (i.e. in the primary or tertiary structure) or is in close proximity to (i.e. in the primary or tertiary structure) the gp130 binding site on IL-6R and/or the IL-6/IL-6R complex (for example, competitively with gp130); and/or are capable of competing with gp130 for binding to the IL-6/IL-6R complex, the term “modulating the interaction between IL-6/IL-6R complex and gp130”, “modulating binding of the IL-6/IL-6R complex to gp130” and/or “inhibiting and/or preventing binding of the IL-6/IL-6R complex to gp130” means binding to IL-6R (i.e. as such or as present in the IL-6/IL-6R complex) in such a way that the formation of the IL-6/IL-6R complex essentially is not affected but that the binding of said complex to gp130 is modulated (e.g. inhibited), so that the signalling, pathway(s) and/or mechanism(s) induced/mediated by the binding of the complex to gp130 is modulated (e.g. reduced) compared to the binding of the complex to gp130 without the presence of the amino acid sequence and/or Nanobody described above (and/or polypeptide comprising the same).

[0339] As such, the biparatopic (or multiparatopic) polypeptides of the invention may at least be capable, upon binding to IL-6R,
[0340] (i) to inhibit or affect (e.g. fully or partially disrupt) the formation of the IL-6/IL-6R complex in such a way that the binding of IL-6 to—e.g. its affinity for—IL-6R is reduced (or reversely, that the binding of IL-6R to—e.g. its affinity for—IL-6 is reduced), so that the signalling, pathway(s) and/or mechanism(s) induced/mediated by the binding of IL-6 to IL-6R is modulated (e.g. reduced) compared to the signalling, pathway(s) and/or mechanism(s) induced/mediated by the binding of IL-6 to IL-6R without the presence of the amino acid sequence and/or polypeptide of the invention; and
[0341] (ii) to inhibit or affect (e.g. fully or partially disrupt) the formation of the IL-6/IL-6R complex is in such a way that the binding of the complex to—e.g. its affinity for—gp130 is reduced (or reversely, that the binding of gp 130 to—e.g. its affinity for—the complex is reduced), so that the signalling, pathway(s) and/or mechanism(s) induced/mediated by the binding of the complex to gp130 is modulated (e.g. reduced) compared to the signalling, pathway(s) and/or mechanism(s) induced/mediated by the binding of the complex to gp130 without the presence of the amino acid sequence or Nanobody of the invention.

[0342] The biparatopic (or multiparatopic) polypeptides of the invention may at least be capable, upon binding to IL-6R,
[0343] (i) to inhibit or affected (e.g. fully or partially disrupt) the formation of the IL-6/IL-6R complex in such a way that the binding of IL-6 to—e.g. its affinity for—IL-6R is reduced (or reversely, that the binding of IL-6R to—e.g. its affinity for—IL-6 is reduced), so that the signalling, pathway(s) and/or mechanism(s) induced/mediated by the binding of IL-6 to IL-6R is modulated (e.g. reduced) compared to the signalling, pathway(s) and/or mechanism(s) induced/mediated by the binding of IL-6 to IL-6R without the presence of the amino acid sequence and/or polypeptide of the invention; and
[0344] (ii) to modulate (e.g. inhibit) the binding of the IL-6/IL-6R complex to gp130, so that the signalling, pathway(s) and/or mechanism(s) induced/mediated by the binding of the IL-6/IL-6R complex to gp130 is modulated (e.g. reduced) compared to the signalling, pathway(s) and/or mechanism(s) induced/mediated by the binding of the IL-6/IL-6R complex to gp130 without the presence of the amino acid sequence and/or polypeptide of the invention.

[0345] The biparatopic (or multiparatopic) polypeptides of the invention may at least be capable, upon binding to IL-6R,
[0346] (i) to inhibit or affect (e.g. fully or partially disrupt) the formation of the IL-6/IL-6R complex is in such a way that the binding of the complex to—e.g. its affinity for—gp130 is reduced (or reversely, that the binding of gp 130 to—e.g. its affinity for—the complex is reduced), so that the signalling, pathway(s) and/or mechanism(s) induced/mediated by the binding of the complex to gp130 is modulated (e.g. reduced) compared to the signalling, pathway(s) and/or mechanism(s) induced/mediated by the binding of the complex to gp130 without the presence of the amino acid sequence or Nanobody of the invention; and
[0347] (ii) to modulate (e.g. inhibit) the binding of the IL-6/IL-6R complex to gp130, so that the signalling, pathway(s) and/or mechanism(s) induced/mediated by the binding of the IL-6/IL-6R complex to gp130 is modulated (e.g. reduced) compared to the signalling, pathway(s) and/or mechanism(s) induced/mediated by the binding of the IL-6/IL-6R complex to gp130 without the presence of the amino acid sequence and/or polypeptide of the invention.

[0348] The biparatopic (or multiparatopic) polypeptides of the invention may at least be capable, upon binding to IL-6R,
[0349] (i) to inhibit or affected (e.g. fully or partially disrupt) the formation of the IL-6/IL-6R complex in such a way that the binding of IL-6 to—e.g. its affinity for IL-6R is reduced (or reversely, that the binding of IL-6R to—e.g. its affinity for—IL-6 is reduced), so that the signalling, pathway(s) and/or mechanism(s) induced/mediated by the binding of IL-6 to IL-6R is modulated (e.g. reduced) compared to the signalling, pathway(s) and/or mechanism(s) induced/mediated by the binding of IL-6 to IL-6R without the presence of the amino acid sequence and/or polypeptide of the invention;
[0350] (ii) to inhibit or affect (e.g. fully or partially disrupt) the formation of the IL-6/IL-6R complex is in such a way that the binding of the complex to—e.g. its affinity for—gp130 is reduced (or reversely, that the binding of gp 130 to—e.g. its affinity for—the complex is reduced), so that the signalling, pathway(s) and/or mechanism(s) induced/mediated by the binding of the complex to gp130 is modulated (e.g. reduced) compared to the signalling, pathway(s) and/or mechanism(s) induced/mediated by the binding of the complex to gp130 without the presence of the amino acid sequence or Nanobody of the invention; and
[0351] (iii) to modulate (e.g. inhibit) the binding of the IL-6/IL-6R complex to gp130, so that the signalling, pathway(s) and/or mechanism(s) induced/mediated by the binding of the IL-6/IL-6R complex to gp130 is modulated (e.g. reduced) compared to the signalling, pathway(s) and/or mechanism(s) induced/mediated by the binding of the IL-6/IL-6R complex to gp130 without the presence of the amino acid sequence and/or polypeptide of the invention.

[0352] The biparatopic (or multiparatopic) polypeptide of the invention or the composition comprising the same should at least “modulate” or effect a change (i.e. an activity, preferably as an antagonist) with respect to at least one the pathway(s) or mechanism(s) in which IL-6, IL-6R, the IL-6/IL-6R complex and/or gp130 (or its pathway(s)) are involved (such as its signalling pathway or metabolic pathway and their associated biological or physiological effects). In one aspect, the biparatopic (or multiparatopic) polypeptide of the invention or the composition comprising the same may “modulate” or effect a change with respect to more than one (such as two, three, four or even more) biological or physiological pathways or mechanisms (i.e. the biparatopic (or multiparatopic) polypeptide of the invention or the composition comprising the same may have more than one mode of action). The different modes of action may be mediated each by one of the binding units (as further defined herein) of the biparatopic polypeptide of the invention, wherein each binding unit binds at a different binding site of IL-6R.

[0353] In a preferred aspect, the biparatopic polypeptide of the invention may modulate the signalling, pathway(s) and/or mechanism(s) induced/mediated by the binding of IL-6 to IL-6R and at the same time modulate the signalling, pathway(s) and/or mechanism(s) induced/mediated by the binding of the IL-6/IL-6R complex to gp130. In another preferred aspect, the biparatopic polypeptide of the invention may combine the modes of action of Tocilizumab (MRA) and M182, the modes of action of the reference IgG and/or reference Fab and M182.

[0354] Accordingly, the present invention also relates to a biparatopic (or multiparatopic) polypeptide or a composition comprising the same that combines two different modes of action each mediated by one of the binding units of the biparatopic polypeptide of the invention, wherein each binding unit binds at a different binding site of IL-6R.

[0355] The amino acid sequences and/or Nanobodies that form (i.e. are comprised in, are encompassed in, are used to generate and/or make up) the biparatopic (or multiparatopic) polypeptides of the invention can be any amino acid sequence and/or Nanobody that is capable of binding to at least one antigenic determinant, epitope, part or domain on IL-6R. Preferred amino acid sequences and/or Nanobodies are e.g. described in WO 08/020,079 and/or are described herein (referred to herein as “amino acid sequence of the invention” and “Nanobody of the invention”).

[0356] Preferably, the amino acid sequences and/or Nanobodies that form (i.e. are comprised in, are encompassed in, are used to generate and/or make up) the biparatopic (or multiparatopic) polypeptides of the invention may bind to IL-6R with an affinity (suitably measured and/or expressed as a K_{D}-value (actual or apparent), a K_{A}-value (actual or apparent), a kₒₙ-rate and/or a k_{off}-rate, or alternatively as an IC₅₀ value, as further described herein) that is as defined herein.

[0357] In particular, the amino acid sequences and/or Nanobodies that form (i.e. are comprised in, are encompassed in, are used to generate and/or make up) the biparatopic (or multiparatopic) polypeptides of the invention are preferably such that they:
[0358] bind to IL-6R with a dissociation constant (K_{D}) of 10⁻⁵ to 10⁻¹² moles/liter or less, and preferably 10⁻⁷ to 10⁻¹² moles/liter or less and more preferably 10⁻⁸ to 10⁻¹² moles/liter (i.e. with an association constant (K_{A}) of 10⁵ to 10¹² liter/moles or more, and preferably 10⁷ to 10¹² liter/moles or more and more preferably 10⁸ to 10¹² liter/moles);
   and/or such that they:
[0359] bind to IL-6R with a k_{off} rate of between 10² M⁻¹s⁴ to about 10⁷ M⁻¹s⁻¹, preferably between 10³ M⁻¹s⁻¹ and 10⁷ M⁻¹s⁻¹, more preferably between 10⁴ M⁻¹s⁻¹ and 10⁷ M⁻¹s⁻¹, such as between 10⁵ M⁻¹s⁻¹ and 10⁷ M⁻¹s⁻¹;
   and/or such that they:
[0360] bind to IL-6R with a k_{off} rate between 1s⁻¹ (t_{1/2}=0.69 s) and 10⁻⁶ s⁻¹ (providing a near irreversible complex with a t_{1/2} of multiple days), preferably between 10⁻² s⁻¹ and 10⁻⁶ s⁻¹, more preferably between 10⁻³ s⁻¹ and 10⁻⁵ s⁻¹, such as between 10⁻⁴s⁻¹ and 10⁻⁵ s⁻¹.

[0361] Preferably, a monovalent amino acid sequence of the invention (or a polypeptide that contains only one amino acid sequence of the invention) is preferably such that it will bind to IL-6R with an affinity less than 500 nM, preferably less than 200 nM, more preferably less than 10 nM, such as less than 500 μM.

[0362] Some preferred IC50 values for binding of the amino acid sequences, Nanobodies and/or polypeptides of the invention to IL-6R will become clear from the further description and examples herein.

[0363] Also, according to the invention, amino acid sequences and/or Nanobodies that form (i.e. are comprised in, are encompassed in, are used to generate and/or make up) the biparatopic (or multiparatopic) polypeptides of the invention that are directed against IL-6R from a first species of warm-blooded animal may or may not show cross-reactivity with IL-6R from one or more other species of warm-blooded animal, by which is meant that these amino acid sequences are also “directed against” (as defined herein) and/or are capable of specific binding to (as defined herein) IL-6R from said warm-blooded animal. For example, amino acid sequences and/or Nanobodies directed against human IL-6R may or may not show cross reactivity with IL-6R from one or more other species of primates (such as, without limitation, monkeys from the genus Macaca (such as, and in particular, cynomologus monkeys (Macaca fascicularis) and/or rhesus monkeys (Macaca mulatto)) and baboon (Papio ursinus)) and/or with IL-6R from one or more species of animals that are often used in animal models for diseases (for example mouse, rat, rabbit, pig or dog), and in particular in animal models for diseases and disorders associated with IL-6R (such as the species and animal models mentioned herein). In this respect, it will be clear to the skilled person that such cross-reactivity, when present, may have advantages from a drug development point of view, since it allows the amino acid sequences, Nanobodies and/or biparatopic (or multiparatopic) polypeptides against human IL-6R to be tested in such disease models. In a preferred but non-limiting aspect, the amino acid sequences and/or Nanobodies that form (i.e. are comprised in, are encompassed in, are used to generate and/or make up) the biparatopic (or multiparatopic) polypeptides of the invention may be cross-reactive with the amino acid sequence for IL-6R from Macaca fascicularis. For this sequence and the corresponding cDNA sequence, reference is also made to WO 09/010,539 (see SEQ ID NO: 3 and FIG. 1B for the cDNA sequence and SEQ ID NO: 4 and FIG. 3B for the amino acid sequence).

[0364] More generally, amino acid sequences, Nanobodies and/or biparatopic (or multiparatopic) polypeptides of the invention that are cross-reactive with IL-6R from multiple species of mammal will usually be advantageous for use in veterinary applications, since it will allow the same amino acid sequence, Nanobody and/or polypeptide to be used across multiple species. Thus, it is also encompassed within the scope of the invention that amino acid sequences, Nanobodies and/or polypeptides directed against IL-6R from one species of animal (such as amino acid sequences, Nanobodies and/or and polypeptides against human IL-6R) can be used in the treatment of another species of animal, as long as the use of the amino acid sequences, Nanobodies and/or polypeptides provide the desired effects in the species to be treated.

[0365] In its broadest sense, the amino acid sequences and/or Nanobodies that form (i.e. are comprised in, are encompassed in, are used to generate and/or make up) the biparatopic (or multiparatopic) polypeptides of the invention are not particularly limited to binding or defined by a specific antigenic determinant, epitope, part or domain of IL-6R against which they are directed. However, it is generally assumed and preferred that these amino acid sequences and/or Nanobodies are preferably directed against any epitope of the IL-6 receptor involved in the interaction of the IL-6 receptor with IL-6.

[0366] Such epitopes or interaction sites have been described in detail in Boulanger et al. (2003, Science 300: 2101-2104) and reference is specifically made to FIG. 2 in cited reference. More preferably, these amino acid sequences and/or Nanobodies may be directed against an extracellular domain of the IL-6 receptor, such as the D1 domain, the D2 domain and/or the D3 domain. Still more preferably, these amino acid sequences and/or Nanobodies may be directed against the extracellular D3 domain of the IL-6 receptor. Still more preferably, these amino acid sequences and/or Nanobodies interact with one or more of the 18 contact residues as described in Boulanger et al. 2003 (Science 300, 2101-2104) present in the extracellular D3 domain of the IL-6 receptor that contribute to the interaction of the IL-6 receptor with IL-6. Most preferably, these amino acid sequences and/or Nanobodies interact with amino acid residues Phe229 and Phe279 present in the extracellular D3 domain of the IL-6 receptor.

[0367] Thus, in one preferred, but non-limiting aspect, the amino acid sequences and/or Nanobodies that form (i.e. are comprised in, are encompassed in, are used to generate and/or make up) the biparatopic (or multiparatopic) polypeptides of the invention are directed against any epitope of the IL-6 receptor involved in the interaction of the IL-6 receptor with IL-6, and are as further defined herein.

[0368] Alternatively the amino acid sequences and/or Nanobodies that form (i.e. are comprised in, are encompassed in, are used to generate and/or make up) the biparatopic (or multiparatopic) polypeptides of the invention are directed against any epitope of the IL-6 receptor involved in the interaction of the IL-6 receptor with gp130. Such epitopes or interaction sites have been described in detail in Boulanger et al. (2003, Science 300: 2101-2104) and reference is specifically made to FIG. 2 in cited reference.

[0369] In this context, according to a non-limiting aspect, these amino acid sequences and/or Nanobodies are preferably such that they can compete for binding to the IL-6 receptor with the commercially available human-mouse reconstituted chimeric monoclonal anti-IL6R antibody Tocilizumab (MRA) (Chugai/Roche) or an antigen binding fragment thereof (see for example WO 92/19759 and corresponding European patent EP 0628639, as well as Shinkura et al. 1998, Anticancer Research 18: 1217-1222), for example in the assay described in Example 11; and/or such that they can bind to the same epitope or binding site on IL-6R as Tocilizumab (MRA), or to an epitope close to said binding site and/or overlapping with said binding site.

[0370] Also, according to a non-limiting aspect, these amino acid sequences and/or Nanobodies are preferably such that they can compete for binding to the IL-6 receptor with the reference IgG and/or reference Fab according to patent EP 0628639; and/or such that they can bind to the same epitope or binding site on IL-6R as said reference IgG or reference Fab, or to an epitope close to said binding site and/or overlapping with said binding site. For the preparation and sequence of said reference IgG and reference Fab, reference is made to Example 1 below, as well as to SEQ ID NO's: 126 to 129.

[0371] Thus, generally and without limitation, the amino acid sequences and/or Nanobodies that form (i.e. are comprised in, are encompassed in, are used to generate and/or make up) the biparatopic (or multiparatopic) polypeptides of the invention may be directed against any epitope of the IL-6 receptor involved in the interaction of the IL-6 receptor with IL-6 and/or gp130.

[0372] In one specific, but non-limiting aspect, the amino acid sequence that forms (i.e. is comprised in, is encompassed in, is used to generate and/or make up) the biparatopic (or multiparatopic) polypeptides of the invention may be an amino acid sequence that comprises an immunoglobulin fold or may be an amino acid sequence that, under suitable conditions (such as physiological conditions) is capable of forming an immunoglobulin fold (i.e. by folding). Reference is inter alia made to the review by Halaby et al., J. (1999) Protein Eng. 12, 563-71. Preferably, when properly folded so as to form an immunoglobulin fold, such an amino acid sequence is capable of specific binding (as defined herein) to IL-6R; and more preferably capable of binding to IL-6R with an affinity (suitably measured and/or expressed as a K_{D}-value (actual or apparent), a K_{A}-value (actual or apparent), a kₒₙ-rate and/or a k_{off}-rate, or alternatively as an IC₅₀ value, as further described herein) that is as defined herein. Also, parts, fragments, analogs, mutants, variants, alleles and/or derivatives of such amino acid sequences are preferably such that they comprise an immunoglobulin fold or are capable for forming, under suitable conditions, an immunoglobulin fold.

[0373] In particular, but without limitation, the amino acid sequence may be amino acid sequence that essentially consists of 4 framework regions (FR1 to FR4 respectively) and 3 complementarity determining regions (CDR1 to CDR3 respectively); or any suitable fragment of such an amino acid sequence (which will then usually contain at least some of the amino acid residues that form at least one of the CDR's, as further described herein).

[0374] The amino acid sequence may in particular be an immunoglobulin sequence or a suitable fragment thereof, and more in particular be an immunoglobulin variable domain sequence or a suitable fragment thereof, such as light chain variable domain sequence (e.g. a V_{L}-sequence) or a suitable fragment thereof; or a heavy chain variable domain sequence (e.g. a V_{H}-sequence) or a suitable fragment thereof. When the amino acid sequence is a heavy chain variable domain sequence, it may be a heavy chain variable domain sequence that is derived from a conventional four-chain antibody (such as, without limitation, a V_{H} sequence that is derived from a human antibody) or be a so-called V_{HH}-sequence (as defined herein) that is derived from a so-called “heavy chain antibody” (as defined herein).

[0375] However, it should be noted that the polypeptides of the invention are not limited by the origin of the amino acid sequence (or of the nucleotide sequence of the invention used to express it), nor as to the way that the amino acid sequence or nucleotide sequence is (or has been) generated or obtained. Thus, such an amino acid sequences may be naturally occurring amino acid sequences (from any suitable species) or synthetic or semi-synthetic amino acid sequences. In a specific but non-limiting aspect of the invention, the amino acid sequence is a naturally occurring immunoglobulin sequence (from any suitable species) or a synthetic or semi-synthetic immunoglobulin sequence, including but not limited to “humanized” (as defined herein) immunoglobulin sequences (such as partially or fully humanized mouse or rabbit immunoglobulin sequences, and in particular partially or fully humanized V_{HH} sequences or Nanobodies), “camelized” (as defined herein) immunoglobulin sequences, as well as immunoglobulin sequences that have been obtained by techniques such as affinity maturation (for example, starting from synthetic, random or naturally occurring immunoglobulin sequences), CDR grafting, veneering, combining fragments derived from different immunoglobulin sequences, PCR assembly using overlapping primers, and similar techniques for engineering immunoglobulin sequences well known to the skilled person; or any suitable combination of any of the foregoing. Reference is for example made to the standard handbooks, as well as to the further description and prior art mentioned herein.

[0376] Similarly, the nucleotide sequence that makes up the nucleotide sequences encoding the polypeptides of the invention may be naturally occurring nucleotide sequences or synthetic or semi-synthetic sequences, and may for example be sequences that are isolated by PCR from a suitable naturally occurring template (e.g. DNA or RNA isolated from a cell), nucleotide sequences that have been isolated from a library (and in particular, an expression library), nucleotide sequences that have been prepared by introducing mutations into a naturally occurring nucleotide sequence (using any suitable technique known per se, such as mismatch PCR), nucleotide sequence that have been prepared by PCR using overlapping primers, or nucleotide sequences that have been prepared using techniques for DNA synthesis known per se.

[0377] The amino acid sequence that forms (i.e. is comprised in, is encompassed in, is used to generate and/or make up) the biparatopic (or multiparatopic) polypeptides of the invention may in particular be a domain antibody (or an amino acid sequence that is suitable for use as a domain antibody), a single domain antibody (or an amino acid sequence that is suitable for use as a single domain antibody), a “dAb” (or an amino acid sequence that is suitable for use as a dAb) or a Nanobody (as defined herein, and including but not limited to a V_{HH} sequence); other single variable domains, or any suitable fragment of any one thereof. For a general description of (single) domain antibodies, reference is also made to the prior art cited above, as well as to EP 0 368 684. For the term “dAb's”, reference is for example made to Ward et al. (Nature 1989 Oct. 12; 341 (6242): 544-6), to Holt et al., Trends Biotechnol., 2003, 21(11):484-490; as well as to for example WO 06/030220, WO 06/003388 and other published patent applications of Domantis Ltd. It should also be noted that, although less preferred in the context of the present invention because they are not of mammalian origin, single domain antibodies or single variable domains can be derived from certain species of shark (for example, the so-called “IgNAR domains”, see for example WO 05/18629).

[0378] In particular, the amino acid sequence of the invention may be a Nanobody® (as defined herein) or a suitable fragment thereof. [Note: Nanobody®, Nanobodies® and Nanoclone® are registered trademarks of Ablynx N.V.]

[0379] For a general description of Nanobodies, reference is made to the further description below, as well as to the prior art cited herein. In this respect, it should however be noted that this description and the prior art mainly described Nanobodies of the so-called “V_{H}3 class” (i.e. Nanobodies with a high degree of sequence homology to human germline sequences of the V_{H}3 class such as DP-47, DP-51 or DP-29). It should however be noted that the polypeptides of the invention in the broadest sense generally may encompass any type of Nanobody directed against IL-6R, and for example also may encompass the Nanobodies belonging to the so-called “V_{H}4 class” (i.e. Nanobodies with a high degree of sequence homology to human germline sequences of the V_{H}4 class such as DP-78), as for example described in WO 07/118,670.

[0380] Generally, Nanobodies (in particular V_{HH} sequences and partially humanized Nanobodies) can in particular be characterized by the presence of one or more “Hallmark residues” (as described herein) in one or more of the framework sequences (again as further described herein).

[0381] Thus, generally, a Nanobody can be defined as an amino acid sequence with the (general) structure

FR1-CDR1-FR2-CDR2-FR3-CDR3-FR4

in which FR1 to FR4 refer to framework regions 1 to 4, respectively, and in which CDR1 to CDR3 refer to the complementarity determining regions 1 to 3, respectively, and in which one or more of the Hallmark residues are as further defined herein.

[0382] In particular, a Nanobody can be an amino acid sequence with the (general) structure

FR1-CDR1-FR2-CDR2-FR3-CDR3-FR4

in which FR1 to FR4 refer to framework regions 1 to 4, respectively, and in which CDR1 to CDR3 refer to the complementarity determining regions 1 to 3, respectively, and in which the framework sequences are as further defined herein.

[0383] More in particular, a Nanobody can be an amino acid sequence with the (general) structure

FR1-CDR1-FR2-CDR2-FR3-CDR3-FR4

in which FR1 to FR4 refer to framework regions 1 to 4, respectively, and in which CDR1 to CDR3 refer to the complementarity determining regions 1 to 3, respectively, and in which:
[0384] i) preferably one or more of the amino acid residues at positions 11, 37, 44, 45, 47, 83, 84, 103, 104 and 108 according to the Kabat numbering are chosen from the Hallmark residues mentioned in Table B-2 below;
   and in which:
[0385] ii) said amino acid sequence has at least 80% amino acid identity with at least one of the amino acid sequences of HQ ID NO's: 1 to 22, in which for the purposes of determining the degree of amino acid identity, the amino acid residues that form the CDR sequences (indicated with X in the sequences of HQ ID NO's: 1 to 22) are disregarded.

[0386] In a non-limiting aspect of the invention, the amino acid sequences and/or Nanobodies that form (i.e. are comprised in, are encompassed in, are used to generate and/or make up) the biparatopic (or multiparatopic) polypeptides of the invention, comprise CDR sequences that are generally as further defined herein (these amino acid sequences and/or Nanobodies are also encompassed in the present invention and are also referred to as “amino acid sequences of the invention” and “Nanobodies of the invention”).

[0387] Thus, the invention also relates to such amino acid sequences and/or Nanobodies that can bind to (as defined herein) and/or are directed against IL-6R and that comprise CDR sequences that are generally as further defined herein, to suitable fragments thereof, as well as to polypeptides that comprise or essentially consist of one or more of such Nanobodies and/or suitable fragments. In a preferred aspect, the invention relates to Nanobodies with SEQ ID NO's: 132 to 232 (see Tables A-1 and A-3).

[0388] In particular, the invention in some specific aspects provides:
[0389] amino acid sequences that are directed against (as defined herein) IL-6R and that have at least 80%, preferably at least 85%, such as 90% or 95% or more sequence identity with at least one of the amino acid sequences of SEQ ID NO's: 132-216 (see Table A-3);
[0390] amino acid sequences that cross-block (as defined herein) the binding of at least one of the amino acid sequences of SEQ ID NO's: 132-216 (see Table A-3) to IL-6R and/or that compete with at least one of the amino acid sequences of SEQ ID NO's: 132-216 (see Table A-3) for binding to IL-6R;
   which amino acid sequences may be as further described herein (and may for example be Nanobodies); as well as polypeptides of the invention that comprise one or more of such amino acid sequences (which may be as further described herein), and particularly biparatopic (or multiparatopic) polypeptides as described herein, and nucleic acid sequences that encode such amino acid sequences and polypeptides. Such amino acid sequences and polypeptides do not include any naturally occurring ligands.

[0391] Accordingly, some particularly preferred Nanobodies of the invention are Nanobodies which can bind (as further defined herein) to and/or are directed against to IL-6R and which:
[0392] i) have at least 80% amino acid identity with at least one of the amino acid sequences of SEQ ID NO's: 132-216 (see Table A-3), in which for the purposes of determining the degree of amino acid identity, the amino acid residues that form the CDR sequences are disregarded. In this respect, reference is also made to Table A-1, which lists the framework 1 sequences (SEQ ID NO's: 233-317), framework 2 sequences (SEQ ID NO's: 403-487), framework 3 sequences (SEQ ID NO's: 573-657) and framework 4 sequences (SEQ ID NO's: 743-827) of the Nanobodies of SEQ ID NO's: 132-216 (see Table A-3) (with respect to the amino acid residues at positions 1 to 4 and 27 to 30 of the framework 1 sequences, reference is also made to the comments made below. Thus, for determining the degree of amino acid identity, these residues are preferably disregarded);
   and in which:
[0393] ii) preferably one or more of the amino acid residues at positions 11, 37, 44, 45, 47, 83, 84, 103, 104 and 108 according to the Kabat numbering are chosen from the Hallmark residues mentioned in Table B-2 below.

[0394] In these Nanobodies, the CDR sequences are generally as further defined herein.

[0395] Again, such Nanobodies may be derived in any suitable manner and from any suitable source, and may for example be naturally occurring V_{HH} sequences (i.e. from a suitable species of Camelid) or synthetic or semi-synthetic amino acid sequences, including but not limited to “humanized” (as defined herein) Nanobodies, “camelized” (as defined herein) immunoglobulin sequences (and in particular camelized heavy chain variable domain sequences), as well as Nanobodies that have been obtained by techniques such as affinity maturation (for example, starting from synthetic, random or naturally occurring immunoglobulin sequences), CDR grafting, veneering, combining fragments derived from different immunoglobulin sequences, PCR assembly using overlapping primers, and similar techniques for engineering immunoglobulin sequences well known to the skilled person; or any suitable combination of any of the foregoing as further described herein. Also, when a Nanobody comprises a V_{HH} sequence, said Nanobody may be suitably humanized, as further described herein, so as to provide one or more further (partially or fully) humanized Nanobodies of the invention. Similarly, when a Nanobody comprises a synthetic or semi-synthetic sequence (such as a partially humanized sequence), said Nanobody may optionally be further suitably humanized, again as described herein, again so as to provide one or more further (partially or fully) humanized Nanobodies of the invention.

[0396] In particular, humanized Nanobodies may be amino acid sequences that are as generally defined for Nanobodies in the previous paragraphs, but in which at least one amino acid residue is present (and in particular, in at least one of the framework residues) that is and/or that corresponds to a humanizing substitution (as defined herein). Some preferred, but non-limiting humanizing substitutions (and suitable combinations thereof) will become clear to the skilled person based on the disclosure herein. In addition, or alternatively, other potentially useful humanizing substitutions can be ascertained by comparing the sequence of the framework regions of a naturally occurring V_{HH} sequence with the corresponding framework sequence of one or more closely related human V_{H} sequences, after which one or more of the potentially useful humanizing substitutions (or combinations thereof) thus determined can be introduced into said V_{HH} sequence (in any manner known per se, as further described herein) and the resulting humanized V_{HH} sequences can be tested for affinity for the target, for stability, for ease and level of expression, and/or for other desired properties. In this way, by means of a limited degree of trial and error, other suitable humanizing substitutions (or suitable combinations thereof) can be determined by the skilled person based on the disclosure herein. Also, based on the foregoing, (the framework regions of) a Nanobody may be partially humanized or fully humanized.

[0397] Some particularly preferred humanized Nanobodies of the invention are humanized variants of the Nanobodies of SEQ ID NO's: 132-216 (see Table A-3).

[0398] Thus, some other preferred Nanobodies of the invention are Nanobodies which can bind (as further defined herein) to IL-6R and which:
[0399] i) are a humanized variant of one of the amino acid sequences of SEQ ID NO's: 132-216 (see Table A-3); and/or
[0400] ii) have at least 80% amino acid identity with at least one of the amino acid sequences of SEQ ID NO's: 132-216 (see Table A-3), in which for the purposes of determining the degree of amino acid identity, the amino acid residues that form the CDR sequences are disregarded;
   and in which:
[0401] i) preferably one or more of the amino acid residues at positions 11, 37, 44, 45, 47, 83, 84, 103, 104 and 108 according to the Kabat numbering are chosen from the Hallmark residues mentioned in Table 8-2 below.

[0402] For binding to IL-6R, an amino acid sequence or Nanobody of the invention will usually contain within its amino acid sequence one or more amino acid residues or one or more stretches of amino acid residues (i.e. with each “stretch” comprising two or amino acid residues that are adjacent to each other or in close proximity to each other, i.e. in the primary or tertiary structure of the amino acid sequence) via which the amino acid sequence or Nanobody of the invention can bind to IL-6R, which amino acid residues or stretches of amino acid residues thus form the “site” for binding to IL-6R (also referred to herein as the “antigen binding site”).

[0403] According to another specific aspect of the invention, the invention provides a number of stretches of amino acid residues (i.e. small peptides) that are particularly suited for binding to IL-6R. These stretches of amino acid residues may be present in, and/or may be incorporated into, an amino acid sequence of the invention, in particular in such a way that they form (part of) the antigen binding site of an amino acid sequence of the invention. As these stretches of amino acid residues were first generated as CDR sequences of heavy chain antibodies or V_{HH} sequences that were raised against IL-6R (or may be based on and/or derived from such CDR sequences, as further described herein), they will also generally be referred to herein as “CDR sequences” (i.e. as CDR1 sequences, CDR2 sequences and CDR3 sequences, respectively). It should however be noted that the invention in its broadest sense is not limited to a specific structural role or function that these stretches of amino acid residues may have in an amino acid sequence of the invention, as long as these stretches of amino acid residues allow the amino acid sequence of the invention to bind to IL-6R. Thus, generally, the invention in its broadest sense comprises any amino acid sequence that is capable of binding to IL-6R and that comprises one or more CDR sequences as described herein, and in particular a suitable combination of two or more such CDR sequences, that are suitably linked to each other via one or more further amino acid sequences, such that the entire amino acid sequence forms a binding domain and/or binding unit that is capable of binding to IL-6R. It should however also be noted that the presence of only one such CDR sequence in an amino acid sequence of the invention may by itself already be sufficient to provide an amino acid sequence of the invention that is capable of binding to IL-6R; reference is for example again made to the so-called “Expedite fragments” described in WO 03/050531.

[0404] Thus, in another specific, but non-limiting aspect, the amino acid sequence of the invention may be an amino acid sequence that comprises at least one amino acid sequence that is chosen from the group consisting of the CDR1 sequences, CDR2 sequences and CDR3 sequences that are described herein (or any suitable combination thereof). In particular, an amino acid sequence of the invention may be an amino acid sequence that comprises at least one antigen binding site, wherein said antigen binding site comprises at least one amino acid sequence that is chosen from the group consisting of the CDR1 sequences, CDR2 sequences and CDR3 sequences that are described herein (or any suitable combination thereof).

[0405] Generally, in this aspect of the invention, the amino acid sequence of the invention may be any amino acid sequence that comprises at least one stretch of amino acid residues, in which said stretch of amino acid residues has an amino acid sequence that corresponds to the sequence of at least one of the CDR sequences described herein. Such an amino acid sequence may or may not comprise an immunoglobulin fold. For example, and without limitation, such an amino acid sequence may be a suitable fragment of an immunoglobulin sequence that comprises at least one such CDR sequence, but that is not large enough to form a (complete) immunoglobulin fold (reference is for example again made to the “Expedite fragments” described in WO 03/050531). Alternatively, such an amino acid sequence may be a suitable “protein scaffold” that comprises least one stretch of amino acid residues that corresponds to such a CDR sequence (i.e. as part of its antigen binding site). Suitable scaffolds for presenting amino acid sequences will be clear to the skilled person, and for example comprise, without limitation, to binding scaffolds based on or derived from immunoglobulins (i.e. other than the immunoglobulin sequences already described herein), protein scaffolds derived from protein A domains (such as Affibodies™), tendamistat, fibronectin, lipocalin, CTLA-4, T-cell receptors, designed ankyrin repeats, avimers and PDZ domains (Binz et al., Nat. Biotech 2005, Vol 23:1257), and binding moieties based on DNA or RNA including but not limited to DNA or RNA aptamers (Ulrich et al., Comb Chem High Throughput Screen 2006 9(8):619-32).

[0406] Again, any amino acid sequence of the invention that comprises one or more of these CDR sequences is preferably such that it can specifically bind (as defined herein) to IL-6R, and more in particular such that it can bind to IL-6R with an affinity (suitably measured and/or expressed as a K_{D}-value (actual or apparent), a K_{A}-value (actual or apparent), a kₒₙ-rate and/or a k_{off}-rate, or alternatively as an IC₅₀ value, as further described herein), that is as defined herein.

[0407] More in particular, the amino acid sequences and/or Nanobodies of the invention should preferably bind to IL-6R with an affinity (suitably measured and/or expressed as a K_{D}-value (actual or apparent), a K_{A}-value (actual or apparent), a kₒₙ-rate and/or a k_{off}-rate, or alternatively as an IC₅₀ value, as further described herein) that is as defined herein.

[0408] In particular, amino acid sequences and/or Nanobodies of the invention are preferably such that they:
[0409] bind to IL-6R with a dissociation constant (K_{D}) of 10⁻⁵ to 10⁻¹² moles/liter or less, and preferably 10⁻⁷ to 10⁻¹² moles/liter or less and more preferably 10⁻⁸ to 10⁻¹² moles/liter (i.e. with an association constant (K_{A}) of 10⁵ to 10¹² liter/moles or more, and preferably 10⁷ to 10¹² liter/moles or more and more preferably 10⁸ to 10¹² liter/moles);
   and/or such that they:
[0410] bind to IL-6R with a kₒₙ-rate of between 10² M⁻¹s⁻¹ to about 10⁷ M⁻¹s⁻¹, preferably between 10³ M⁻¹s⁻¹ and 10⁷ M⁻¹s⁻¹, more preferably between 10⁴ M⁻¹s⁻¹ and 10⁷ M⁻¹s⁻¹, such as between 10⁵ M⁻¹s⁻¹ and 10⁷ M⁻¹s⁻¹;
   and/or such that they:
[0411] bind to IL-6R with a k_{off} rate between 1 s⁻¹ (t_{1/2}=0.69 s) and 10⁻⁶ s⁻¹ (providing a near irreversible complex with a t_{1/2} of multiple days), preferably between 10⁻² s⁻¹ and 10⁻⁶ s⁻¹, more preferably between 10⁻³ s⁻¹ and 10⁻⁶ s⁻¹, such as between 10⁻⁴ s⁻¹ and 10⁻⁶ s⁻¹.

[0412] Preferably, a monovalent amino acid sequence of the invention (or a polypeptide that contains only one amino acid sequence of the invention) is preferably such that it will bind to IL-6R with an affinity less than 500 nM, preferably less than 200 nM, more preferably less than 10 nM, such as less than 500 μM.

[0413] Some preferred IC50 values for binding of the amino acid sequences, Nanobodies and/or polypeptides of the invention to IL-6R will become clear from the further description and examples herein.

[0414] More in particular, the amino acid sequences according to this aspect of the invention may be any amino acid sequence that comprises at least one antigen binding site, wherein said antigen binding site comprises at least two amino acid sequences that are chosen from the group consisting of the CDR1 sequences described herein, the CDR2 sequences described herein and the CDR3 sequences described herein, such that (i) when the first amino acid sequence is chosen from the CDR1 sequences described herein, the second amino acid sequence is chosen from the CDR2 sequences described herein or the CDR3 sequences described herein; (ii) when the first amino acid sequence is chosen from the CDR2 sequences described herein, the second amino acid sequence is chosen from the CDR1 sequences described herein or the CDR3 sequences described herein; or (iii) when the first amino acid sequence is chosen from the CDR3 sequences described herein, the second amino acid sequence is chosen from the CDR1 sequences described herein or the CDR3 sequences described herein.

[0415] Even more in particular, the amino acid sequences of the invention may be amino acid sequences that comprise at least one antigen binding site, wherein said antigen binding site comprises at least three amino acid sequences that are chosen from the group consisting of the CDR1 sequences described herein, the CDR2 sequences described herein and the CDR3 sequences described herein, such that the first amino acid sequence is chosen from the CDR1 sequences described herein, the second amino acid sequence is chosen from the CDR2 sequences described herein, and the third amino acid sequence is chosen from the CDR3 sequences described herein. Preferred combinations of CDR1, CDR2 and CDR3 sequences will become clear from the further description herein. As will be clear to the skilled person, such an amino acid sequence is preferably an immunoglobulin sequence (as further described herein), but it may for example also be any other amino acid sequence that comprises a suitable scaffold for presenting said CDR sequences.

[0416] Thus, in one specific, but non-limiting aspect, the invention relates to an amino acid sequence directed against IL-6R, that comprises one or more stretches of amino acid residues chosen from the group consisting of:
[0417] a) the amino acid sequences of SEQ ID NO's: 302-386;
[0418] b) amino acid sequences that have at least 80% amino acid identity with at least one of the amino acid sequences of SEQ ID NO's: 302-386;
[0419] c) amino acid sequences that have 3, 2, or 1 amino acid difference with at least one of the amino acid sequences of SEQ ID NO's: 302-386;
[0420] d) the amino acid sequences of SEQ ID NO's: 472-556;
[0421] e) amino acid sequences that have at least 80% amino acid identity with at least one of the amino acid sequences of SEQ ID NO's: 472-556;
[0422] f) amino acid sequences that have 3, 2, or 1 amino acid difference with at least one of the amino acid sequences of SEQ ID NO's: 472-556;
[0423] g) the amino acid sequences of SEQ ID NO's: 642-726;
[0424] h) amino acid sequences that have at least 80% amino acid identity with at least one of the amino acid sequences of SEQ ID NO's: 542-726;
[0425] i) amino acid sequences that have 3, 2, or 1 amino acid difference with at least one of the amino acid sequences of SEQ ID NO's: 642-726;
   or any suitable combination thereof.

[0426] When an amino acid sequence of the invention contains one or more amino acid sequences according to b) and/or c):
[0427] i) any amino acid substitution in such an amino acid sequence according to b) and/or c) is preferably, and compared to the corresponding amino acid sequence according to a), a conservative amino acid substitution, (as defined herein);
   and/or
[0428] ii) the amino acid sequence according to b) and/or c) preferably only contains amino acid substitutions, and no amino acid deletions or insertions, compared to the corresponding amino acid sequence according to a);
   and/or
[0429] iii) the amino acid sequence according to b) and/or c) may be an amino acid sequence that is derived from an amino acid sequence according to a) by means of affinity maturation using one or more techniques of affinity maturation known per se.

[0430] Similarly, when an amino acid sequence of the invention contains one or more amino acid sequences according to e) and/or f):
[0431] i) any amino acid substitution in such an amino acid sequence according to e) and/or f) is preferably, and compared to the corresponding amino acid sequence according to d), a conservative amino acid substitution, (as defined herein);
   and/or
[0432] ii) the amino acid sequence according to e) and/or f) preferably only contains amino acid substitutions, and no amino acid deletions or insertions, compared to the corresponding amino acid sequence according to d);
   and/or
[0433] iii) the amino acid sequence according to e) and/or f) may be an amino acid sequence that is derived from an amino acid sequence according to d) by means of affinity maturation using one or more techniques of affinity maturation known per se.

[0434] Also, similarly, when an amino acid sequence of the invention contains one or more amino acid sequences according to h) and/or i):
[0435] i) any amino acid substitution in such an amino acid sequence according to h) and/or i) is preferably, and compared to the corresponding amino acid sequence according to g), a conservative amino acid substitution, (as defined herein);
   and/or
[0436] ii) the amino acid sequence according to h) and/or i) preferably only contains amino acid substitutions, and no amino acid deletions or insertions, compared to the corresponding amino acid sequence according to g);
   and/or
[0437] iii) the amino acid sequence according to h) and/or i) may be an amino acid sequence that is derived from an amino acid sequence according to g) by means of affinity maturation using one or more techniques of affinity maturation known per se.

[0438] It should be understood that the last preceding paragraphs also generally apply to any amino acid sequences of the invention that comprise one or more amino acid sequences according to b), c), e), f), h) or i), respectively.

[0439] In this specific aspect, the amino acid sequence preferably comprises one or more stretches of amino acid residues chosen from the group consisting of:
[0440] i) the amino acid sequences of SEQ ID NO's: 302-386;
[0441] ii) the amino acid sequences of SEQ ID NO's: 472-556; and
[0442] iii) the amino acid sequences of SEQ ID NO's: 642-726;
   or any suitable combination thereof.

[0443] Also, preferably, in such an amino acid sequence, at least one of said stretches of amino acid residues forms part of the antigen binding site for binding against IL-6R.

[0444] In a more specific, but again non-limiting aspect, the invention relates to an amino acid sequence directed against IL-6R, that comprises two or more stretches of amino acid residues chosen from the group consisting of:
[0445] a) the amino acid sequences of SEQ ID NO's: 302-386;
[0446] b) amino acid sequences that have at least 80% amino acid identity with at least one of the amino acid sequences of SEQ ID NO's: 302-386;
[0447] c) amino acid sequences that have 3, 2, or 1 amino acid difference with at least one of the amino acid sequences of SEQ ID NO's: 302-386;
[0448] d) the amino acid sequences of SEQ ID NO's: 472-556;
[0449] e) amino acid sequences that have at least 80% amino acid identity with at least one of the amino acid sequences of SEQ ID NO's: 472-556;
[0450] f) amino acid sequences that have 3, 2, or 1 amino acid difference with at least one of the amino acid sequences of SEQ ID NO's: 472-556;
[0451] g) the amino acid sequences of SEQ ID NO's: 642-726;
[0452] h) amino acid sequences that have at least 80% amino acid identity with at least one of the amino acid sequences of SEQ ID NO's: 642-726;
[0453] i) amino acid sequences that have 3, 2, or 1 amino acid difference with at least one of the amino acid sequences of SEQ ID NO's: 642-726;
   such that (i) when the first stretch of amino acid residues corresponds to one of the amino acid sequences according to a), b) or c), the second stretch of amino acid residues corresponds to one of the amino acid sequences according to d), e), f), g), h) or i); (ii) when the first stretch of amino acid residues corresponds to one of the amino acid sequences according to d), e) or f), the second stretch of amino acid residues corresponds to one of the amino acid sequences according to a), b), c), g), h) or i); or (iii) when the first stretch of amino acid residues corresponds to one of the amino acid sequences according to g), h) or i), the second stretch of amino acid residues corresponds to one of the amino acid sequences according to a), b), c), d), e) or f).

[0454] In this specific aspect, the amino acid sequence preferably comprises two or more stretches of amino acid residues chosen from the group consisting of:
[0455] i) the amino acid sequences of SEQ ID NO's: 302-386;
[0456] ii) the amino acid sequences of SEQ ID NO's: 472-556; and
[0457] iii) the amino acid sequences of SEQ ID NO's: 642-726;
   such that, (i) when the first stretch of amino acid residues corresponds to one of the amino acid sequences of SEQ ID NO's: 302-386, the second stretch of amino acid residues corresponds to one of the amino acid sequences of SEQ ID NO's: 472-556 or of SEQ ID NO's: 642-726; (ii) when the first stretch of amino acid residues corresponds to one of the amino acid sequences of SEQ ID NO's: 472-556, the second stretch of amino acid residues corresponds to one of the amino acid sequences of SEQ ID NO's: 302-386 or of SEQ ID NO's: 642-726; or (iii) when the first stretch of amino acid residues corresponds to one of the amino acid sequences of SEQ ID NO's: 642-726, the second stretch of amino acid residues corresponds to one of the amino acid sequences of SEQ ID NO's: 302-386 or of SEQ ID NO's: 472-556.

[0458] Also, in such an amino acid sequence, the at least two stretches of amino acid residues again preferably form part of the antigen binding site for binding against IL-6R.

[0459] In an even more specific, but non-limiting aspect, the invention relates to an amino acid sequence directed against IL-6R, that comprises three or more stretches of amino acid residues, in which the first stretch of amino acid residues is chosen from the group consisting of:
[0460] a) the amino acid sequences of SEQ ID NO's: 302-386;
[0461] b) amino acid sequences that have at least 80% amino acid identity with at least one of the amino acid sequences of SEQ ID NO's: 302-386;
[0462] c) amino acid sequences that have 3, 2, or 1 amino acid difference with at least one of the amino acid sequences of SEQ ID NO's: 302-386; the second stretch of amino acid residues is chosen from the group consisting of:
[0463] d) the amino acid sequences of SEQ ID NO's: 472-556;
[0464] e) amino acid sequences that have at least 80% amino acid identity with at least one of the amino acid sequences of SEQ ID NO's: 472-556;
[0465] f) amino acid sequences that have 3, 2, or 1 amino acid difference with at least one of the amino acid sequences of SEQ ID NO's: 472-556;
   and the third stretch of amino acid residues is chosen from the group consisting of:
[0466] g) the amino acid sequences of SEQ ID NO's: 642-726;
[0467] h) amino acid sequences that have at least 80% amino acid identity with at least one of the amino acid sequences of SEQ ID NO's: 642-726;

[0468] i) amino acid sequences that have 3, 2, or 1 amino acid difference with at least one of the amino acid sequences of SEQ ID NO's: 642-726.

[0469] Preferably, in this specific aspect, the first stretch of amino acid residues is chosen from the group consisting of the amino acid sequences of SEQ ID NO's: 302-386; the second stretch of amino acid residues is chosen from the group consisting of the amino acid sequences of SEQ ID NO's: 472-556; and the third stretch of amino acid residues is chosen from the group consisting of the amino acid sequences of SEQ ID NO's: 642-726.

[0470] Again, preferably, in such an amino acid sequence, the at least three stretches of amino acid residues forms part of the antigen binding site for binding against IL-6R.

[0471] Preferred combinations of such stretches of amino acid sequences will become clear from the further disclosure herein.

[0472] Preferably, in such amino acid sequences the CDR sequences have at least 70% amino acid identity, preferably at least 80% amino acid identity, more preferably at least 90% amino acid identity, such as 95% amino acid identity or more or even essentially 100% amino acid identity with the CDR sequences of at least one of the amino acid sequences of SEQ ID NO's: 132-216 (see Table A-1). This degree of amino acid identity can for example be determined by determining the degree of amino acid identity (in a manner described herein) between said amino acid sequence and one or more of the sequences of SEQ ID NO's: 132-216 (see Table A-3), in which the amino acid residues that form the framework regions are disregarded. Also, such amino acid sequences of the invention can be as further described herein.

[0473] Also, such amino acid sequences are preferably such that they can specifically bind (as defined herein) to IL-6R; and more in particular bind to IL-6R with an affinity (suitably measured and/or expressed as a K_{D}-value (actual or apparent), a K_{A}-value (actual or apparent), a kₒₙ-rate and/or a k_{off}-rate, or alternatively as an IC₅₀ value, as further described herein) that is as defined herein.

[0474] When the amino acid sequence of the invention essentially consists of 4 framework regions (FR1 to FR4, respectively) and 3 complementarity determining regions (CDR1 to CDR3, respectively), the amino acid sequence of the invention is preferably such that:

[0475] CDR1 is chosen from the group consisting of:
[0476] a) the amino acid sequences of SEQ ID NO's: 302-386;
[0477] b) amino acid sequences that have at least 80% amino acid identity with at least one of the amino acid sequences of SEQ ID NO's: 302-386;
[0478] c) amino acid sequences that have 3, 2, or 1 amino acid difference with at least one of the amino acid sequences of SEQ ID NO's: 302-386;
   and/or

[0479] CDR2 is chosen from the group consisting of:
[0480] d) the amino acid sequences of SEQ ID NO's: 472-556;
[0481] e) amino acid sequences that have at least 80% amino acid identity with at least one of the amino acid sequences of SEQ ID NO's: 472-556;
[0482] f) amino acid sequences that have 3, 2, or 1 amino acid difference with at least one of the amino acid sequences of SEQ ID NO's: 472-556;
   and/or

[0483] CDR3 is chosen from the group consisting of:
[0484] g) the amino acid sequences of SEQ ID NO's: 642-726;
[0485] h) amino acid sequences that have at least 80% amino acid identity with at least one of the amino acid sequences of SEQ ID NO's: 642-726;
[0486] i) amino acid sequences that have 3, 2, or 1 amino acid difference with at least one of the amino acid sequences of SEQ ID NO's: 642-726.

[0487] In particular, such an amino acid sequence of the invention may be such that CDR1 is chosen from the group consisting of the amino acid sequences of SEQ ID NO's: 302-386; and/or CDR2 is chosen from the group consisting of the amino acid sequences of SEQ ID NO's: 472-556; and/or CDR3 is chosen from the group consisting of the amino acid sequences of SEQ ID NO's: 642-726.

[0488] In particular, when the amino acid sequence of the invention essentially consists of 4 framework regions (FR1 to FR4, respectively) and 3 complementarity determining regions (CDR1 to CDR3, respectively), the amino acid sequence of the invention is preferably such that:

[0489] CDR1 is chosen from the group consisting of:
[0490] a) the amino acid sequences of SEQ ID NO's: 302-386;
[0491] b) amino acid sequences that have at least 80% amino acid identity with at least one of the amino acid sequences of SEQ ID NO's: 302-386;
[0492] c) amino acid sequences that have 3, 2, or 1 amino acid difference with at least one of the amino acid sequences of SEQ ID NO's: 302-386;
   and

[0493] CDR2 is chosen from the group consisting of:
[0494] d) the amino acid sequences of SEQ ID NO's: 472-556;
[0495] e) amino acid sequences that have at least 80% amino acid identity with at least one of the amino acid sequences of SEQ ID NO's: 472-556;
[0496] f) amino acid sequences that have 3, 2, or 1 amino acid difference with at least one of the amino acid sequences of SEQ ID NO's: 472-556;
   and

[0497] CDR3 is chosen from the group consisting of:
[0498] g) the amino acid sequences of SEQ ID NO's: 642-726;
[0499] h) amino acid sequences that have at least 80% amino acid identity with at least one of the amino acid sequences of SEQ ID NO's: 642-726;
[0500] i) amino acid sequences that have 3, 2, or 1 amino acid difference with at least one of the amino acid sequences of SEQ ID NO's: 642-726; or any suitable fragment of such an amino acid sequence

[0501] In particular, such an amino acid sequence of the invention may be such that CDR1 is chosen from the group consisting of the amino acid sequences of SEQ ID NO's: 302-386; and CDR2 is chosen from the group consisting of the amino acid sequences of SEQ ID NO's: 472-556; and CDR3 is chosen from the group consisting of the amino acid sequences of SEQ ID NO's: 642-726,

[0502] Again, preferred combinations of CDR sequences will become clear from the further description herein.

[0503] Also, such amino acid sequences are preferably such that they can specifically bind (as defined herein) to IL-6R; and more in particular bind to IL-6R with an affinity (suitably measured and/or expressed as a K_{D}-value (actual or apparent), a K_{A}-value (actual or apparent), a kₒₙ-rate and/or a k_{off}-rate, or alternatively as an IC₅₀ value, as further described herein) that is as defined herein.

[0504] In one preferred, but non-limiting aspect, the invention relates to an amino acid sequence that essentially consists of 4 framework regions (FR1 to FR4, respectively) and 3 complementarity determining regions (CDR1 to CDR3, respectively), in which the CDR sequences of said amino acid sequence have at least 70% amino acid identity, preferably at least 80% amino acid identity, more preferably at least 90% amino acid identity, such as 95% amino acid identity or more or even essentially 100% amino acid identity with the CDR sequences of at least one of the amino acid sequences of SEQ ID NO's: 132-216 (see Table A-1). This degree of amino acid identity can for example be determined by determining the degree of amino acid identity (in a manner described herein) between said amino acid sequence and one or more of the sequences of SEQ ID NO's: 132-216 (see Table A-3), in which the amino acid residues that form the framework regions are disregarded. Such amino acid sequences of the invention can be as further described herein.

[0505] In such an amino acid sequence of the invention, the framework sequences may be any suitable framework sequences, and examples of suitable framework sequences will be clear to the skilled person, for example on the basis the standard handbooks and the further disclosure and prior art mentioned herein.

[0506] The framework sequences are preferably (a suitable combination of) immunoglobulin framework sequences or framework sequences that have been derived from immunoglobulin framework sequences (for example, by humanization or camelization). For example, the framework sequences may be framework sequences derived from a light chain variable domain (e.g. a sequence) and/or from a heavy chain variable domain (e.g. a Vᵤ-sequence). In one particularly preferred aspect, the framework sequences are either framework sequences that have been derived from a V_{HH}-sequence (in which said framework sequences may optionally have been partially or fully humanized) or are conventional V_{H} sequences that have been camelized (as defined herein).

[0507] The framework sequences are preferably such that the amino acid sequence of the invention is a domain antibody (or an amino acid sequence that is suitable for use as a domain antibody); is a single domain antibody (or an amino acid sequence that is suitable for use as a single domain antibody); is a “dAb” (or an amino acid sequence that is suitable for use as a dAb); or is a Nanobody (including but not limited to V_{HH}, sequence). Again, suitable framework sequences will be clear to the skilled person, for example on the basis the standard handbooks and the further disclosure and prior art mentioned herein.

[0508] In particular, the framework sequences present in the amino acid sequences of the invention may contain one or more of Hallmark residues (as defined herein), such that the amino acid sequence of the invention is a Nanobody (also referred to as “Nanobody of the invention”). Some preferred, but non-limiting examples of (suitable combinations of) such framework sequences will become clear from the further disclosure herein.

[0509] For a general description of heavy chain antibodies and the variable domains thereof, reference is inter alia made to the prior art cited herein, as well as to the prior art mentioned on page 59 of WO 08/020,079 and to the list of references mentioned on pages 41-43 of the International application WO 06/040153, which prior art and references are incorporated herein by reference.

[0510] In accordance with the terminology used in the art (see the above references), the variable domains present in naturally occurring heavy chain antibodies will also be referred to as “V_{HH} domains”, in order to distinguish them from the heavy chain variable domains that are present in conventional 4-chain antibodies (which will be referred to hereinbelow as “V_{H} domains”) and from the light chain variable domains that are present in conventional 4-chain antibodies (which will be referred to hereinbelow as “V_{L} domains”).

[0511] As mentioned in the prior art referred to above, V_{HH} domains have a number of unique structural characteristics and functional properties which make isolated V_{HH} domains (as well as Nanobodies based thereon, which share these structural characteristics and functional properties with the naturally occurring V_{HH} domains) and proteins containing the same highly advantageous for use as functional antigen-binding domains or proteins. In particular, and without being limited thereto, V_{HH} domains (which have been “designed” by nature to functionally bind to an antigen without the presence of, and without any interaction with, a light chain variable domain) and Nanobodies can function as a single, relatively small, functional antigen-binding structural unit, domain or protein. This distinguishes the V_{HH} domains from the V_{H} and V, domains of conventional 4-chain antibodies, which by themselves are generally not suited for practical application as single antigen-binding proteins or domains, but need to be combined in some form or another to provide a functional antigen-binding unit (as in for example conventional antibody fragments such as Fab fragments; in ScFv's fragments, which consist of a V_{H} domain covalently linked to a V_{L} domain).

[0512] Because of these unique properties, the use of V_{HH} domains and Nanobodies as single antigen-binding proteins or as antigen-binding domains (i.e. as part of a larger protein or polypeptide) offers a number of significant advantages over the use of conventional V_{H} and V_{L} domains, scFv's or conventional antibody fragments (such as Fab- or F(ab′)₂-fragments), including the advantages that are listed on pages 60 and 61 of WO 08/020,079.

[0513] In one aspect, the invention provides Nanobodies against IL-6R, and in particular Nanobodies against IL-6R from a warm-blooded animal, and more in particular Nanobodies against IL-6R from a mammal, and especially Nanobodies against human IL-6R; as well as proteins and/or polypeptides comprising at least one such Nanobody.

[0514] In particular, the invention provides Nanobodies against IL-6R, and proteins and/or polypeptides comprising the same, as well as biparatopic (or multiparatopic) polypeptides, that have improved therapeutic and/or pharmacological properties and/or other advantageous properties (such as, for example, improved ease of preparation and/or reduced costs of goods), compared to conventional antibodies against IL-6R or fragments thereof, compared to constructs that could be based on such conventional antibodies or antibody fragments (such as Fab′ fragments, F(ab′)₂ fragments, ScFv constructs, “diabodies” and other multispecific constructs (see for example the review by Holliger and Hudson, Nat. Biotechnol. 2005 September; 23(9):1126-36)), and also compared to the so-called “dAb's” or similar (single) domain antibodies that may be derived from variable domains of conventional antibodies. These improved and advantageous properties will become clear from the further description herein, and for example include, without limitation, one or more of:
[0515] increased affinity and/or avidity for IL-6R, either in a monovalent format, in a multivalent format (for example in a bivalent format), in a multiparatopic format(for example in a biparatopic format) and/or in a multispecific format (for example one of the multispecific formats described hereinbelow);
[0516] better suitability for formatting in a multivalent format (for example in a bivalent format);
[0517] better suitability for formatting in a multiparatopic format (for example one of the multiparatopic formats described hereinbelow);
[0518] better suitability for formatting in a multispecific format (for example one of the multispecific formats described hereinbelow);
[0519] improved suitability or susceptibility for “humanizing” substitutions (as defined herein);
[0520] less immunogenicity, either in a monovalent format, in a multivalent format (for example in a bivalent format), in multiparatopic format (for example in a biparatopic format) and/or in a multispecific format (for example one of the multispecific formats described hereinbelow);
[0521] increased stability, either in a monovalent format, in a multivalent format (for example in a bivalent format), in multiparatopic format (for example in a biparatopic format) and/or in a multispecific format (for example one of the multispecific formats described hereinbelow);
[0522] increased specificity towards IL-6R, either in a monovalent format, in a multivalent format (for example in a bivalent format), in multiparatopic format (for example in a biparatopic format) and/or in a multispecific format (for example one of the multispecific formats described hereinbelow);
[0523] decreased or where desired increased cross-reactivity with IL-6R from different species;
   and/or
[0524] one or more other improved properties desirable for pharmaceutical use (including prophylactic use and/or therapeutic use) and/or for diagnostic use (including but not limited to use for imaging purposes), either in a monovalent format, in a multivalent format (for example in a bivalent format), in multiparatopic format (for example in a biparatopic format) and/or in a multispecific format (for example one of the multispecific formats described hereinbelow).

[0525] As generally described herein for the amino acid sequences of the invention, the Nanobodies of the invention are preferably in essentially isolated form (as defined herein), or form part of a protein or polypeptide of the invention (as defined herein), which may comprise or essentially consist of one or more Nanobodies of the invention and which may optionally further comprise one or more further amino acid sequences (all optionally linked via one or more suitable linkers). For example, and without limitation, the one or more amino acid sequences of the invention may be used as a binding unit in such a protein or polypeptide, which may optionally contain one or more further amino acid sequences that can serve as a binding unit (i.e. against one or more other targets than IL-6R), so as to provide a monovalent, multivalent, multiparatopic or multispecific polypeptide of the invention, respectively, all as described herein. In particular, such a protein or polypeptide may comprise or essentially consist of one or more Nanobodies of the invention and optionally one or more (other) Nanobodies (i.e. directed against the same or other targets than IL-6R), all optionally linked via one or more suitable linkers, so as to provide a monovalent, multivalent, multiparatopic or multispecific Nanobody construct, respectively, as further described herein. Such proteins or polypeptides may also be in essentially isolated form (as defined herein).

[0526] As already described herein, the amino acid sequence and structure of a Nanobody can be considered—without however being limited thereto—to be comprised of four framework regions or “FR's” (or sometimes also referred to as “FW's”), which are referred to in the art and herein as

[0527] “Framework region 1” or “FR1”; as “Framework region 2” or “FR2”; as “Framework region 3” or “FR3”; and as “Framework region 4” or “FR4”, respectively; which framework regions are interrupted by three complementary determining regions or “CDR's”, which are referred to in the art as “Complementarity Determining Region 1” or “CDR1”; as “Complementarity Determining Region 2” or “CDR2”; and as “Complementarity Determining Region 3” or “CDR3”, respectively. Some preferred framework sequences and CDR's (and combinations thereof) that are present in the Nanobodies of the invention are as described herein. Other suitable CDR sequences can be obtained by the methods described herein.

[0528] According to a non-limiting but preferred aspect of the invention, (the CDR sequences present in) the Nanobodies of the invention are such that:
[0529] the Nanobodies can bind to IL-6R with a dissociation constant (Kₛ) of 10⁻⁵ to 10⁻¹² moles/liter or less, and preferably 10⁻⁷ to 10⁻¹⁷ moles/liter or less and more preferably 10⁻⁸ to 10⁻¹² moles/liter (i.e. with an association constant (K_{A}) of 10⁵ to 10¹² liter/moles or more, and preferably 10⁷ to 10¹² liter/moles or more and more preferably 10⁸ to 10¹² liter/moles);
   and/or such that:
[0530] the Nanobodies can bind to IL-6R with a kₒₙ-rate of between 10² M⁻¹s⁻¹ to about 10⁷ M⁻¹s⁻¹, preferably between 10³ M⁻¹s⁻¹ and 10⁷ M⁻¹s⁻¹, more preferably between 10⁴ M⁻¹s⁻¹ and 10⁷ s⁻¹, such as between 10⁵ M⁻¹s⁻¹ and 10⁷ M⁻¹s⁻¹;
   and/or such that they:
[0531] the Nanobodies can bind to IL-6R with a k_{off} rate between 1 s⁻¹ (t_{1/2}=0.69 s) and 10⁻⁶ s⁻¹ (providing a near irreversible complex with a t_{1/2} of multiple days), preferably between 10⁻² s⁻¹ and 10⁻⁶ s⁻¹, more preferably between 10⁻³ s⁻¹ and 10⁻⁶ s⁻¹, such as between 10⁻⁴ s⁻¹ and 10⁻⁶ s⁻¹.

[0532] Preferably, (the CDR sequences present in) the Nanobodies of the invention are such that: a monovalent Nanobody of the invention (or a polypeptide that contains only one Nanobody of the invention) is preferably such that it will bind to IL-6R with an affinity less than 500 nM, preferably less than 200 nM, more preferably less than 10 nM, such as less than 500 μM.

[0533] The affinity of the Nanobody of the invention against IL-6R can be determined in a manner known per se, for example using the general techniques for measuring K_{D}. K_{A}, k_{off} or kₒₙ mentioned herein, as well as some of the specific assays described herein.

[0534] Some preferred IC50 values for binding of the Nanobodies of the invention (and of polypeptides comprising the same) to IL-6R will become clear from the further description and examples herein.

[0535] In a preferred but non-limiting aspect, the invention relates to a Nanobody (as defined herein) against IL-6R, which consists of 4 framework regions (FR1 to FR4 respectively) and 3 complementarity determining regions (CDR1 to CDR3 respectively), in which:

[0536] CDR1 is chosen from the group consisting of:
[0537] a) the amino acid sequences of SEQ ID NO's: 302-386;
[0538] b) amino acid sequences that have at least 80% amino acid identity with at least one of the amino acid sequences of SEQ ID NO's: 302-386;
[0539] c) amino acid sequences that have 3, 2, or 1 amino acid difference with at least one of the amino acid sequences of SEQ ID NO's: 302-386;
   and/or

[0540] CDR2 is chosen from the group consisting of:
[0541] d) the amino acid sequences of SEQ ID NO's: 472-556;
[0542] e) amino acid sequences that have at least 80% amino acid identity with at least one of the amino acid sequences of SEQ ID NO's: 472-556;
[0543] f) amino acid sequences that have 3, 2, or 1 amino acid difference with at least one of the amino acid sequences of SEQ ID NO's: 472-556;
   and/or

[0544] CDR3 is chosen from the group consisting of:
[0545] g) the amino acid sequences of SEQ ID NO's: 642-726;
[0546] h) amino acid sequences that have at least 80% amino acid identity with at least one of the amino acid sequences of SEQ ID NO's: 642-726;
[0547] i) amino acid sequences that have 3, 2, or 1 amino acid difference with at least one of the amino acid sequences of SEQ ID NO's: 642-726;
   or any suitable fragment of such an amino acid sequence.

[0548] In particular, according to this preferred but non-limiting aspect, the invention relates to a Nanobody (as defined herein) against IL-6R, which consists of 4 framework regions (FR1 to FR4 respectively) and 3 complementarity determining regions (CDR1 to CDR3 respectively), in which:

[0549] CDR1 is chosen from the group consisting of:
[0550] a) the amino acid sequences of SEQ ID NO's: 302-386;
[0551] b) amino acid sequences that have at least 80% amino acid identity with at least one of the amino acid sequences of SEQ ID NO's: 302-386;
[0552] c) amino acid sequences that have 3, 2, or 1 amino acid difference with at least one of the amino acid sequences of SEQ ID NO's: 302-386;
   and

[0553] CDR2 is chosen from the group consisting of:
[0554] d) the amino acid sequences of SEQ ID NO's: 472-556;
[0555] e) amino acid sequences that have at least 80% amino acid identity with at least one of the amino acid sequences of SEQ ID NO's: 472-556;
[0556] f) amino acid sequences that have 3, 2, or 1 amino acid difference with at least one of the amino acid sequences of SEQ ID NO's: 472-556;
   and

[0557] CDR3 is chosen from the group consisting of:
[0558] g) the amino acid sequences of SEQ ID NO's: 642-726;
[0559] h) amino acid sequences that have at least 80% amino acid identity with at least one of the amino acid sequences of SEQ ID NO's: 642-726;
[0560] i) amino acid sequences that have 3, 2, or 1 amino add difference with at least one of the amino acid sequences of SEQ ID NO′S: 642-726;
   or any suitable fragment of such an amino acid sequences.

[0561] As generally mentioned herein for the amino acid sequences of the invention, when a Nanobody of the invention contains one or more CDR1 sequences according to b) and/or c):
[0562] i) any amino acid substitution in such a CDR according to b) and/or c) is preferably, and compared to the corresponding CDR according to a), a conservative amino acid substitution (as defined herein);
   and/or
[0563] ii) the CDR according to b) and/or c) preferably only contains amino acid substitutions, and no amino acid deletions or insertions, compared to the corresponding CDR according to a);
   and/or
[0564] iii) the CDR according to b) and/or c) may be a CDR that is derived from a CDR according to a) by means of affinity maturation using one or more techniques of affinity maturation known per se.

[0565] Similarly, when a Nanobody of the invention contains one or more CDR2 sequences according to e) and/or f):
[0566] i) any amino acid substitution in such a CDR according to e) and/or f) is preferably, and compared to the corresponding CDR according to d), a conservative amino acid substitution (as defined herein);
   and/or
[0567] ii) the CDR according to e) and/or f) preferably only contains amino acid substitutions, and no amino acid deletions or insertions, compared to the corresponding CDR according to d);
   and/or
[0568] iii) the CDR according to e) and/or f) may be a CDR that is derived from a CDR according to d) by means of affinity maturation using one or more techniques of affinity maturation known per se.

[0569] Also, similarly, when a Nanobody of the invention contains one or more CDR3 sequences according to h) and/or i):
[0570] i) any amino acid substitution in such a CDR according to h) and/or i) is preferably, and compared to the corresponding CDR according to g), a conservative amino acid substitution (as defined herein);
   and/or
[0571] ii) the CDR according to h) and/or i) preferably only contains amino acid substitutions, and no amino acid deletions or insertions, compared to the corresponding CDR according to g);
   and/or
[0572] iii) the CDR according to h) and/or i) may be a CDR that is derived from a CDR according to g) by means of affinity maturation using one or more techniques of affinity maturation known per se.

[0573] It should be understood that the last three paragraphs generally apply to any Nanobody of the invention that comprises one or more CDR1 sequences, CDR2 sequences and/or CDR3 sequences according to b), c), e), f), h) or i), respectively.

[0574] Of the Nanobodies of the invention, Nanobodies comprising one or more of the CDR's explicitly listed above are particularly preferred; Nanobodies comprising two or more of the CDR's explicitly listed above are more particularly preferred; and Nanobodies comprising three of the CDR's explicitly listed above are most particularly preferred.

[0575] Some particularly preferred, but non-limiting combinations of CDR sequences, as well as preferred combinations of CDR sequences and framework sequences, are mentioned in Table A-1 below, which lists the CDR sequences and framework sequences that are present in a number of preferred (but non-limiting) Nanobodies of the invention. As will be clear to the skilled person, a combination of CDR1, CDR2 and CDR3 sequences that occur in the same clone (i.e. CDR1, CDR2 and CDR3 sequences that are mentioned on the same line in Table A-1) will usually be preferred (although the invention in its broadest sense is not limited thereto, and also comprises other suitable combinations of the CDR sequences mentioned in Table A-1). Also, a combination of CDR sequences and framework sequences that occur in the same clone (i.e. CDR sequences and framework sequences that are mentioned on the same line in Table A-1) will usually be preferred (although the invention in its broadest sense is not limited thereto, and also comprises other suitable combinations of the CDR sequences and framework sequences mentioned in Table A-1, as well as combinations of such CDR sequences and other suitable framework sequences, e.g. as further described herein).

[0576] Also, in the Nanobodies of the invention that comprise the combinations of CDR's mentioned in Table A-1, each CDR can be replaced by a CDR chosen from the group consisting of amino acid sequences that have at least 80%, preferably at least 90%, more preferably at least 95%, even more preferably at least 99% sequence identity (as defined herein) with the mentioned CDR's; in which:
[0577] i) any amino acid substitution in such a CDR is preferably, and compared to the corresponding CDR sequence mentioned in Table A-1, a conservative amino acid substitution (as defined herein);
   and/or
[0578] ii) any such CDR sequence preferably only contains amino acid substitutions, and no amino acid deletions or insertions, compared to the corresponding CDR sequence mentioned in Table A-1;
   and/or
[0579] iii) any such CDR sequence is a CDR that is derived by means of a technique for affinity maturation known per se, and in particular starting from the corresponding CDR sequence mentioned in Table A-1.

[0580] However, as will be clear to the skilled person, the (combinations of) CDR sequences, as well as (the combinations of) CDR sequences and framework sequences mentioned in Table A-1 will generally be preferred.

[0581] Thus, in the Nanobodies of the invention, at least one of the CDR1, CDR2 and CDR3 sequences present is suitably chosen from the group consisting of the CDR1, CDR2 and CDR3 sequences, respectively, listed in Table A-1; or from the group of CDR1, CDR2 and CDR3 sequences, respectively, that have at least 80%, preferably at least 90%, more preferably at least 95%, even more preferably at least 99% “sequence identity” (as defined herein) with at least one of the CDR1, CDR2 and CDR3 sequences, respectively, listed in Table A-1; and/or from the group consisting of the CDR1, CDR2 and CDR3 sequences, respectively, that have 3, 2 or only 1 “amino acid difference(s)” (as defined herein) with at least one of the CDR1, CDR2 and CDR3 sequences, respectively, listed in Table A-1.

[0582] In this context, by “suitably chosen” is meant that, as applicable, a CDR1 sequence is chosen from suitable CDR1 sequences (i.e. as defined herein), a CDR2 sequence is chosen from suitable CDR2 sequences (i.e. as defined herein), and a CDR3 sequence is chosen from suitable CDR3 sequence (i.e. as defined herein), respectively. More in particular, the CDR sequences are preferably chosen such that the Nanobodies of the invention bind to IL-6R with an affinity (suitably measured and/or expressed as a K_{D}-value (actual or apparent), a K_{A}-value (actual or apparent), a kₒₙ-rate and/or a k_{off}-rate, or alternatively as an IC₅₀ value, as further described herein) that is as defined herein.

[0583] In particular, in the Nanobodies of the invention, at least the CDR3 sequence present is suitably chosen from the group consisting of the CDR3 sequences listed in Table A-1 or from the group of CDR3 sequences that have at least 80%, preferably at least 90%, more preferably at least 95%, even more preferably at least 99% sequence identity with at least one of the CDR3 sequences listed in Table A-1; and/or from the group consisting of the CDR3 sequences that have 3, 2 or only 1 amino acid difference(s) with at least one of the CDR3 sequences listed in Table A-1.

[0584] Preferably, in the Nanobodies of the invention, at least two of the CDR1, CDR2 and CDR3 sequences present are suitably chosen from the group consisting of the CDR1, CDR2 and CDR3 sequences, respectively, listed in Table A-1 or from the group consisting of CDR1, CDR2 and CDR3 sequences, respectively, that have at least 80%, preferably at least 90%, more preferably at least 95%, even more preferably at least 99% sequence identity with at least one of the CDR1, CDR2 and CDR3 sequences, respectively, listed in Table A-1; and/or from the group consisting of the CDR1, CDR2 and CDR3 sequences, respectively, that have 3, 2 or only 1 “amino acid difference(s)” with at least one of the CDR1, CDR2 and CDR3 sequences, respectively, listed in Table A-1.

[0585] In particular, in the Nanobodies of the invention, at least the CDR3 sequence present is suitably chosen from the group consisting of the CDR3 sequences listed in Table A-1 or from the group of CDR3 sequences that have at least 80%, preferably at least 90%, more preferably at least 95%, even more preferably at least 99% sequence identity with at least one of the CDR3 sequences listed in Table A-1, respectively; and at least one of the CDR1 and CDR2 sequences present is suitably chosen from the group consisting of the CDR1 and CDR2 sequences, respectively, listed in Table A-1 or from the group of CDR1 and CDR2 sequences, respectively, that have at least 80%, preferably at least 90%, more preferably at least 95%, even more preferably at least 99% sequence identity with at least one of the CDR1 and CDR2 sequences, respectively, listed in Table B-1; and/or from the group consisting of the CDR1 and CDR2 sequences, respectively, that have 3, 2 or only 1 amino acid difference(s) with at least one of the CDR1 and CDR2 sequences, respectively, listed in Table A-1.

[0586] Most preferably, in the Nanobodies of the invention, all three CDR1, CDR2 and CDR3 sequences present are suitably chosen from the group consisting of the CDR1, CDR2 and CDR3 sequences, respectively, listed in Table A-1 or from the group of CDR1, CDR2 and CDR3 sequences, respectively, that have at least 80%, preferably at least 90%, more preferably at least 95%, even more preferably at least 99% sequence identity with at least one of the CDR1, CDR2 and CDR3 sequences, respectively, listed in Table A-1; and/or from the group consisting of the CDR1, CDR2 and CDR3 sequences, respectively, that have 3, 2 or only 1 amino acid difference(s) with at least one of the CDR1, CDR2 and CDR3 sequences, respectively, listed in Table A-1.

[0587] Even more preferably, in the Nanobodies of the invention, at least one of the CDR1, CDR2 and CDR3 sequences present is suitably chosen from the group consisting of the CDR1, CDR2 and CDR3 sequences, respectively, listed in Table A-1. Preferably, in this aspect, at least one or preferably both of the other two CDR sequences present are suitably chosen from CDR sequences that have at least 80%, preferably at least 90%, more preferably at least 95%, even more preferably at least 99% sequence identity with at least one of the corresponding CDR sequences, respectively, listed in Table A-1; and/or from the group consisting of the CDR sequences that have 3, 2 or only 1 amino acid difference(s) with at least one of the corresponding sequences, respectively, listed in Table A-1.

[0588] In particular, in the Nanobodies of the invention, at least the CDR3 sequence present is suitably chosen from the group consisting of the CDR3 listed in Table A-1. Preferably, in this aspect, at least one and preferably both of the CDR1 and CDR2 sequences present are suitably chosen from the groups of CDR1 and CDR2 sequences, respectively, that have at least 80%, preferably at least 90%, more preferably at least 95%, even more preferably at least 99% sequence identity with the CDR1 and CDR2 sequences, respectively, listed in Table A-1; and/or from the group consisting of the CDR1 and CDR2 sequences, respectively, that have 3, 2 or only 1 amino acid difference(s) with at least one of the CDR1 and CDR2 sequences, respectively, listed in Table A-1.

[0589] Even more preferably, in the Nanobodies of the invention, at least two of the CDR1, CDR2 and CDR3 sequences present are suitably chosen from the group consisting of the CDR1, CDR2 and CDR3 sequences, respectively, listed in Table A-1. Preferably, in this aspect, the remaining CDR sequence present is suitably chosen from the group of CDR sequences that have at least 80%, preferably at least 90%, more preferably at least 95%, even more preferably at least 99% sequence identity with at least one of the corresponding CDR sequences listed in Table A-1; and/or from the group consisting of CDR sequences that have 3, 2 or only 1 amino acid difference(s) with at least one of the corresponding sequences listed in Table A-1.

[0590] In particular, in the Nanobodies of the invention, at least the CDR3 sequence is suitably chosen from the group consisting of the CDR3 sequences listed in Table A-1, and either the CDR1 sequence or the CDR2 sequence is suitably chosen from the group consisting of the CDR1 and CDR2 sequences, respectively, listed in Table A-1. Preferably, in this aspect, the remaining CDR sequence present is suitably chosen from the group of CDR sequences that have at least 80%, preferably at least 90%, more preferably at least 95%, even more preferably at least 99% sequence identity with at least one of the corresponding CDR sequences listed in Table A-1; and/or from the group consisting of CDR sequences that have 3, 2 or only 1 amino acid difference(s) with the corresponding CDR sequences listed in Table A-1.

[0591] Even more preferably, in the Nanobodies of the invention, all three COR1., CDR2 and CDR3 sequences present are suitably chosen from the group consisting of the CDR1, CDR2 and CDR3 sequences, respectively, listed in Table A-1.

[0592] Also, generally, the combinations of CDR's listed in Table A-1 (i.e. those mentioned on the same line in Table A-1) are preferred. Thus, it is generally preferred that, when a CDR in a Nanobody of the invention is a CDR sequence mentioned in Table A-1 or is suitably chosen from the group of CDR sequences that have at least 80%, preferably at least 90%, more preferably at least 95%, even more preferably at least 99% sequence identity with a CDR sequence listed in Table A-1; and/or from the group consisting of CDR sequences that have 3, 2 or only 1 amino acid difference(s) with a CDR sequence listed in Table A-1, that at least one and preferably both of the other CDR's are suitably chosen from the CDR sequences that belong to the same combination in Table A-1 (i.e. mentioned on the same line in Table A-1) or are suitably chosen from the group of CDR sequences that have at least 80%, preferably at least 90%, more preferably at least 95%, even more preferably at least 99% sequence identity with the CDR sequence(s) belonging to the same combination and/or from the group consisting of CDR sequences that have 3, 2 or only 1 amino acid difference(s) with the CDR sequence(s) belonging to the same combination. The other preferences indicated in the above paragraphs also apply to the combinations of CDR's mentioned in Table A-1.

[0593] Thus, by means of non-limiting examples, a Nanobody of the invention can for example comprise a CDR1 sequence that has more than 80% sequence identity with one of the CDR1 sequences mentioned in Table A-1, a CDR2 sequence that has 3, 2 or 1 amino acid difference with one of the CDR2 sequences mentioned in Table A-1 (but belonging to a different combination), and a CDR3 sequence.

[0594] Some preferred Nanobodies of the invention may for example comprise: (1) a CDR1 sequence that has more than 80% sequence identity with one of the CDR1 sequences mentioned in Table A-1; a CDR2 sequence that has 3, 2 or 1 amino acid difference with one of the CDR2 sequences mentioned in Table A-1 (but belonging to a different combination); and a CDR3 sequence that has more than 80% sequence identity with one of the CDR3 sequences mentioned in Table A-1 (but belonging to a different combination); or (2) a CDR1 sequence that has more than 80% sequence identity with one of the CDR1 sequences mentioned in Table A-1; a CDR2 sequence, and one of the CDR3 sequences listed in Table A-1; or (3) a CDR1 sequence; a CDR2 sequence that has more than 80% sequence identity with one of the CDR2 sequence listed in Table A-1; and a CDR3 sequence that has 3, 2 or 1 amino acid differences with the CDR3 sequence mentioned in Table A-1 that belongs to the same combination as the CDR2 sequence.

[0595] Some particularly preferred Nanobodies of the invention may for example comprise: (1) a CDR1 sequence that has more than 80% sequence identity with one of the CDR1 sequences mentioned in Table A-1; a CDR2 sequence that has 3, 2 or 1 amino acid difference with the CDR2 sequence mentioned in Table A-1 that belongs to the same combination; and a CDR3 sequence that has more than 80% sequence identity with the CDR3 sequence mentioned in Table A-1 that belongs to the same combination; (2) a CDR1 sequence; a CDR 2 listed in Table A-1 and a CDR3 sequence listed in Table A-1 (in which the CDR2 sequence and CDR3 sequence may belong to different combinations).

[0596] Some even more preferred Nanobodies of the invention may for example comprise: (1) a CDR1 sequence that has more than 80% sequence identity with one of the CDR1 sequences mentioned in Table A-1; the CDR2 sequence listed in Table A-1 that belongs to the same combination; and a CDR3 sequence mentioned in Table A-1 that belongs to a different combination; or (2) a CDR1 sequence mentioned in Table A-1; a CDR2 sequence that has 3, 2 or 1 amino acid differences with the CDR2 sequence mentioned in Table A-1 that belongs to the same combination; and a CDR3 sequence that has more than 80% sequence identity with the CDR3 sequence listed in Table A-1 that belongs to the same or a different combination.

[0597] Particularly preferred Nanobodies of the invention may for example comprise a CDR1 sequence mentioned in Table A-1, a CDR2 sequence that has more than 80% sequence identity with the CDR2 sequence mentioned in Table A-1 that belongs to the same combination; and the CDR3 sequence mentioned in Table A-1 that belongs to the same combination.

[0598] In the most preferred Nanobodies of the invention, the CDR1, CDR2 and CDR3 sequences present are suitably chosen from one of the combinations of CDR1, CDR2 and CDR3 sequences, respectively, listed in Table A-1.

[0599] According to another preferred, but non-limiting aspect of the invention (a) CDR1 has a length of between 1 and 12 amino acid residues, and usually between 2 and 9 amino acid residues, such as 5, 6 or 7 amino acid residues; and/or (b) CDR2 has a length of between 13 and 24 amino acid residues, and usually between 15 and 21 amino acid residues, such as 16 and 17 amino acid residues; and/or (c) CDR3 has a length of between 2 and 35 amino acid residues, and usually between 3 and 30 amino acid residues, such as between 6 and 23 amino acid residues.

[0600] In another preferred, but non-limiting aspect, the invention relates to a Nanobody in which the CDR sequences (as defined herein) have more than 80%, preferably more than 90%, more preferably more than 95%, such as 99% or more sequence identity (as defined herein) with the CDR sequences of at least one of the amino acid sequences of SEQ ID NO's: 132-216 (see Tables A-1 and A-3).

[0601] Generally, Nanobodies with the above CDR sequences may be as further described herein, and preferably have framework sequences that are also as further described herein. Thus, for example and as mentioned herein, such Nanobodies may be naturally occurring Nanobodies (from any suitable species), naturally occurring V_{HH} sequences (i.e. from a suitable species of Camelid) or synthetic or semi-synthetic amino acid sequences or Nanobodies, including but not limited to partially humanized Nanobodies or V_{HH} sequences, fully humanized Nanobodies or V_{HH} sequences, camelized heavy chain variable domain sequences, as well as Nanobodies that have been obtained by the techniques mentioned herein.

[0602] Thus, in one specific, but non-limiting aspect, the invention relates to a humanized Nanobody, which consists of 4 framework regions (FR1 to FR4 respectively) and 3 complementarity determining regions (CDR1 to CDR3 respectively), in which CDR1 to CDR3 are as defined herein and in which said humanized Nanobody comprises at least one humanizing substitution (as defined herein), and in particular at least one humanizing substitution in at least one of its framework sequences (as defined herein).

[0603] In another preferred, but non-limiting aspect, the invention relates to a Nanobody in which the CDR sequences have at least 70% amino acid identity, preferably at least 80% amino acid identity, more preferably at least 90% amino acid identity, such as 95% amino acid identity, 99% amino acid identity or more or even essentially 100% amino acid identity with the CDR sequences of at least one of the amino acid sequences of SEQ ID NO's: 132-216 (see Table A-1). This degree of amino acid identity can for example be determined by determining the degree of amino acid identity (in a manner described herein) between said Nanobody and one or more of the sequences of SEQ ID NO's: 132-216 (see Table A-1), in which the amino acid residues that form the framework regions are disregarded. Such Nanobodies can be as further described herein.

[0604] In another preferred, but non-limiting aspect, the invention relates to a Nanobody with an amino acid sequence that is chosen from the group consisting of SEQ ID NO's: 132-216 (see Table A-1) or from the group consisting of from amino acid sequences that have more than 80%, preferably more than 90%, more preferably more than 95%, such as 99% or more sequence identity (as defined herein) with at least one of the amino acid sequences of SEQ ID NO's: 132-216 (see Table A-1).

[0605] Another preferred, but non-limiting aspect of the invention relates to humanized variants of the Nanobodies of SEQ ID NO's: 132-216 (see Table A-1), that comprise, compared to the corresponding native V_{HH} sequence, at least one humanizing substitution (as defined herein), and in particular at least one humanizing substitution in at least one of its framework sequences (as defined herein).

[0606] The amino acid sequences and/or Nanobodies provided by the invention are preferably in essentially isolated form (as defined herein), or form part of a protein or polypeptide of the invention (as defined herein), preferably a biparatopic (or multiparatopic) polypeptide of the invention, which may comprise or essentially consist of one or more amino acid sequences and/or Nanobodies of the invention and which may optionally further comprise one or more further amino acid sequences and/or Nanobodies (all optionally linked via one or more suitable linkers). For example, and without limitation, the one or more amino acid sequences and/or Nanobodies of the invention may be used as a binding unit in such a protein or polypeptide, which may optionally contain one or more further amino acid sequences and/or Nanobodies that can serve as a binding unit (i.e. against one or more other targets than IL-6R), so as to provide a monovalent, multivalent, multiparatopic or multispecific polypeptide of the invention, respectively, all as described herein. Such a protein or polypeptide may also be in essentially isolated form (as defined herein).

[0607] Accordingly, the invention also provides compounds and constructs, and in particular proteins and polypeptides (also referred to herein as “compound of the invention”, “construct of the invention” and “polypeptide of the invention”), that comprise or essentially consists of at least one such biparatopic (or multiparatopic) polypeptide, amino acid sequence and/or Nanobody of the invention (or suitable fragments thereof), and optionally further comprises one or more other groups, residues, moieties or binding units. As will become clear to the skilled person from the further disclosure herein, such further groups, residues, moieties, binding units or amino acid sequences may or may not provide further functionality to the amino acid sequence and/or Nanobody of the invention (and/or to the compound or construct in which it is present) and may or may not modify the properties of the amino acid sequence and/or Nanobody of the invention.

[0608] For example, such further groups, residues, moieties or binding units may be one or more additional amino acid sequences, such that the compound or construct is a (fusion) protein or (fusion) polypeptide. In a preferred but non-limiting aspect, said one or more other groups, residues, moieties or binding units are immunoglobulin sequences. Even more preferably, said one or more other groups, residues, moieties or binding units are chosen from the group consisting of domain antibodies, amino acid sequences that are suitable for use as a domain antibody, single domain antibodies, amino acid sequences that are suitable for use as a single domain antibody, “dAb”'s, amino acid sequences that are suitable for use as a dAb, or Nanobodies.

[0609] Alternatively, such groups, residues, moieties or binding units may for example be chemical groups, residues, moieties, which may or may not by themselves be biologically and/or pharmacologically active. For example, and without limitation, such groups may be linked to the one or more amino acid sequences of the invention so as to provide a “derivative” of an amino acid sequence or polypeptide of the invention, as further described herein.

[0610] Also within the scope of the present invention are compounds or constructs, that comprises or essentially consists of one or more derivatives as described herein, and optionally further comprises one or more other groups, residues, moieties or binding units, optionally linked via one or more linkers. Preferably, said one or more other groups, residues, moieties or binding units are amino acid sequences.

[0611] In the compounds or constructs described above, the one or more biparatopic (or multiparatopic) polypeptides, amino acid sequences and/or Nanobodies of the invention and the one or more groups, residues, moieties or binding units may be linked directly to each other and/or via one or more suitable linkers or spacers. For example, when the one or more groups, residues, moieties or binding units are amino acid sequences, the linkers may also be amino acid sequences, so that the resulting compound or construct is a fusion (protein) or fusion (polypeptide).

[0612] Accordingly, the invention also relates to a polypeptide that comprises or essentially consist of a Nanobody of the invention. Without being limiting, the biparatopic (or multiparatopic) polypeptides of the invention described herein will preferably also comprise or essentially consist of at least one Nanobody of the invention. However, also encompassed within the present invention are biparatopic (or multiparatopic) polypeptides that comprise amino acid sequences and/or Nanobodies that are not described herein as (preferred) amino acid sequences and/or Nanobodies of the invention. As long as these amino acid sequences and/or Nanobodies are also capable of binding two or more different antigenic determinants or epitopes on IL-6R, the resulting biparatopic (or multiparatopic) polypeptides will also be considered a biparatopic (or multiparatopic) polypeptide of the invention. Some preferred, but non-limiting examples of polypeptides of the invention are given in SEQ ID NO's: 812-947 (see Tables A-4, A-5 and A-6).

[0613] It will be clear to the skilled person that the Nanobodies that are mentioned herein as “preferred” (or “more preferred”, “even more preferred”, etc.) are also preferred (or more preferred, or even more preferred, etc.) for use in the (multiparatopic) polypeptides described herein. Thus, polypeptides that comprise or essentially consist of one or more “preferred” Nanobodies of the invention will generally be preferred, and polypeptides that comprise or essentially consist of one or more “more preferred” Nanobodies of the invention will generally be more preferred, etc.

[0614] Generally, proteins or polypeptides that comprise or essentially consist of a single Nanobody (such as a single Nanobody of the invention) will be referred to herein as “monovalent” proteins or polypeptides or as “monovalent constructs”. Proteins and polypeptides that comprise or essentially consist of two or more Nanobodies (such as at least two Nanobodies of the invention or at least one Nanobody of the invention and at least one other Nanobody) will be referred to herein as “multivalent” proteins or polypeptides or as “multivalent constructs”, and these may provide certain advantages compared to the corresponding monovalent Nanobodies of the invention. Some non-limiting examples of such multivalent constructs will become clear from the further description herein.

[0615] According to one specific, but non-limiting aspect, a polypeptide of the invention comprises or essentially consists of at least two Nanobodies of the invention, such as two or three Nanobodies of the invention. As further described herein, such multivalent constructs can provide certain advantages compared to a protein or polypeptide comprising or essentially consisting of a single Nanobody of the invention, such as a much improved avidity for IL-6R. Such multivalent constructs will be clear to the skilled person based on the disclosure herein.

[0616] According to another specific, but non-limiting aspect, a polypeptide of the invention comprises or essentially consists of at least one Nanobody of the invention and at least one other binding unit (i.e. directed against another epitope, antigen, target, protein or polypeptide), which is preferably also a Nanobody. Such proteins or polypeptides are also referred to herein as “multispecific” proteins or polypeptides or as ‘multispecific constructs”, and these may provide certain advantages compared to the corresponding monovalent Nanobodies of the invention (as will become clear from the further discussion herein of some preferred, but-nonlimiting multispecific constructs). Such multispecific constructs will be clear to the skilled person based on the disclosure herein.

[0617] Polypeptides of the invention that contain at least two Nanobodies, in which at least one Nanobody is directed against a first antigen (i.e. against IL-6R) and at least one Nanobody is directed against a second antigen (i.e. different from IL-6R), will also be referred to as “multispecific” polypeptides of the invention, and the Nanobodies present in such polypeptides will also be referred to herein as being in a “multispecific format”. Thus, for example, a “bispecific” polypeptide of the invention is a polypeptide that comprises at least one Nanobody directed against a first antigen (i.e. IL-6R) and at least one further Nanobody directed against a second antigen (i.e. different from IL-6R), whereas a “trispecific” polypeptide of the invention is a polypeptide that comprises at least one Nanobody directed against a first antigen (i.e. IL-6R), at least one further Nanobody directed against a second antigen (i.e. different from IL-6R) and at least one further Nanobody directed against a third antigen (i.e. different from both IL-6R, and the second antigen); etc.

[0618] Accordingly, in its simplest form, a bispecific polypeptide of the invention is a bivalent polypeptide of the invention (as defined herein), comprising a first Nanobody directed against IL-6R, and a second Nanobody directed against a second antigen, in which said first and second Nanobody may optionally be linked via a linker sequence (as defined herein); whereas a trispecific polypeptide of the invention in its simplest form is a trivalent polypeptide of the invention (as defined herein), comprising a first Nanobody directed against IL-6R, a second Nanobody directed against a second antigen and a third Nanobody directed against a third antigen, in which said first, second and third Nanobody may optionally be linked via one or more, and in particular one and more, in particular two, linker sequences.

[0619] However, as will be clear from the description hereinabove, the invention is not limited thereto, in the sense that a multispecific polypeptide of the invention may comprise at least one Nanobody against IL-6R], and any number of Nanobodies directed against one or more antigens different from IL-6R.

[0620] According to another specific, but non-limiting aspect, a polypeptide of the invention comprises or essentially consists of at least one Nanobody of the invention and at least one other binding unit directed against IL-6R (i.e. directed against another antigenic determinant or epitope), which is preferably also a Nanobody. Such proteins or polypeptides are also referred to herein as “multiparatopic” proteins or polypeptides or as ‘multiparatopic constructs”, and these may provide certain advantages compared to the corresponding monovalent Nanobodies of the invention (as will become clear from the further discussion herein of some preferred, but-nonlimiting multiparatopic constructs). Such multiparatopic constructs will be clear to the skilled person based on the disclosure herein; some preferred, but non-limiting examples of such multiparatopic Nanobody constructs are the constructs of SEQ ID NO's: 812-947.

[0621] Furthermore, although it is encompassed within the scope of the invention that the specific order or arrangement of the various Nanobodies in the polypeptides of the invention may have some influence on the properties of the final polypeptide of the invention (including but not limited to the affinity, specificity or avidity for IL-6R, or against the one or more other antigens), said order or arrangement is usually not critical and may be suitably chosen by the skilled person, optionally after some limited routine experiments based on the disclosure herein. Thus, when reference is made to a specific multivalent or multispecific polypeptide of the invention, it should be noted that this encompasses any order or arrangements of the relevant Nanobodies, unless explicitly indicated otherwise.

[0622] Finally, it is also within the scope of the invention that the polypeptides of the invention contain two or more Nanobodies and one or more further amino acid sequences (as mentioned herein).

[0623] For multivalent and multispecific polypeptides containing one or more V_{HH} domains and their preparation, reference is also made to Conrath et al., J. Biol. Chem., Vol. 276, 10. 7346-7350, 2001; Muyldermans, Reviews in Molecular Biotechnology 74 (2001), 277-302; as well as to for example WO 96/34103 and WO 99/23221. Some other examples of some specific multispecific and/or multivalent polypeptide of the invention can be found in the applications by Ablynx N.V. referred to herein.

[0624] As will be clear from the further description above and herein, this means that the amino acid sequences and/or Nanobodies of the invention can be used as “building blocks” to form polypeptides (preferably biparatopic polypeptides) of the invention, i.e. by suitably combining them with other groups, residues, moieties or binding units, in order to form compounds or constructs as described herein (such as, without limitations, the bi/multiparatopic. bi/multivalent and bi/multispecific polypeptides of the invention described herein) which combine within one molecule one or more desired properties or biological functions.

[0625] The compounds or polypeptides of the invention can generally be prepared by a method which comprises at least one step of suitably linking the one or more amino acid sequences and/or Nanobodies of the invention to the one or more further groups, residues, moieties or binding units, optionally via the one or more suitable linkers, so as to provide the compound or polypeptide of the invention. Polypeptides of the invention can also be prepared by a method which generally comprises at least the steps of providing a nucleic acid that encodes a polypeptide of the invention, expressing said nucleic acid in a suitable manner, and recovering the expressed polypeptide of the invention. Such methods can be performed in a manner known per se, which will be clear to the skilled person, for example on the basis of the methods and techniques further described herein.

[0626] The process of designing/selecting and/or preparing a compound or polypeptide of the invention, starting from an amino acid sequence and/or Nanobody (of the invention), is also referred to herein as “formatting” said amino acid sequence and/or Nanobody (of the invention); and an amino acid and/or Nanobody (of the invention) that is made part of a compound or polypeptide of the invention is said to be “formatted” or to be in the format of said compound or polypeptide of the invention. Examples of ways in which an amino acid sequence and/or Nanobody (of the invention)can be formatted and examples of such formats will be clear to the skilled person based on the disclosure herein; and such formatted amino acid sequences and/or Nanobody (of the invention) form a further aspect of the invention. As described herein, preferred formats in the present invention are biparatopic (or multiparatopic) polypeptides.

[0627] Therefore, in a preferred aspect, the invention also provides a method for preparing a multivalent (such as multiparatopic, and preferably biparatopic) polypeptides of the invention comprising at least the steps of linking two or more monovalent amino acid sequences and/or Nanobodies, or monovalent constructs and for example one or more linkers together in a suitable manner. The monovalent amino acid sequences and/or Nanobodies or the monovalent constructs (and linkers) can be coupled by any method known in the art and as further described herein. Preferred techniques include the linking of the nucleic acid sequences that encode the monovalent amino acid sequences and/or Nanobodies or monovalent constructs (and linkers) to prepare a genetic construct that expresses the multivalent (such as multiparatopic, and preferably biparatopic) polypeptide of the invention. Techniques for linking amino acid sequences or nucleic acid sequences will be clear to the skilled person, and reference is again made to the standard handbooks, such as Sambrook et al. and Ausubel et al., mentioned herein, as well as the Examples below.

[0628] Accordingly, the present invention also relates to the use of a monovalent construct (which may comprise or essentially consists of an amino acid sequence such as a domain antibody, an amino acid sequence that is suitable for use as a domain antibody, a single domain antibody, an amino acid sequence that is suitable for use as a single domain antibody, a “dAb”, an amino acid sequences that is suitable for use as a dAb, or a Nanobody) in providing and/or preparing a multivalent (such as multiparatopic, and preferably biparatopic) compound, construct or polypeptide. The monovalent construct is then used as a binding domain or binding unit in providing and/or preparing the multivalent (such as multiparatopic, and preferably biparatopic) construct comprising two (e.g. in a biparatopic construct) or more (e.g. in a multiparatopic construct) binding units. In this respect, the monovalent construct may be used as a binding domain or binding unit in providing and/or preparing a multivalent (such as multiparatopic, and preferably biparatopic) construct of the invention comprising two or more binding units.

[0629] The monovalent construct that is used as a binding domain or binding unit may comprise or essentially consists of any amino acid sequences and/or Nanobodies that is capable of binding to at least one antigenic determinant, epitope, part or domain on IL-6R. Preferred amino acid sequences and/or Nanobodies are e.g. described in WO 08/020,079 and/or are described herein (referred to herein as “amino acid sequence of the invention” and “Nanobody of the invention”).

[0630] In a preferred aspect, the monovalent construct (which may comprise or essentially consists of an amino acid sequence such as a domain antibody, an amino acid sequence that is suitable for use as a domain antibody, a single domain antibody, an amino acid sequence that is suitable for use as a single domain antibody, a “dAb”, an amino acid sequences that is suitable for use as a dAb, or a Nanobody) is used in providing and/or preparing a multivalent (such as multiparatopic, and preferably biparatopic) construct that exhibits intramolecular binding compared to intermolecular binding. In such multivalent constructs of the invention that comprises amino acid sequences directed against two or more (different) antigenic determinants on IL-6R (for example against different epitopes of IL-6R), the length and flexibility of the linker are preferably such that, when the multivalent (such as multiparatopic, and preferably biparatopic) construct binds to IL-6R, at least two and preferably all of the amino acid sequences that are present in the multivalent construct can (simultaneously) bind to each of their intended antigenic determinants, epitopes, parts or domains, most preferably so as to allow binding with increased avidity and also intramolecular binding and/or recognition. Accordingly, the present invention also relates to the use of a monovalent construct (which may comprise or essentially consists of an amino acid sequence such as a domain antibody, an amino acid sequence that is suitable for use as a domain antibody, a single domain antibody, an amino acid sequence that is suitable for use as a single domain antibody, a “dAb”, an amino acid sequences that is suitable for use as a dAb, or a Nanobody) as a binding domain or binding unit in providing and/or preparing a multivalent (such as multiparatopic, and preferably biparatopic) construct, wherein the binding domains or binding units are linked via a linker such that the multivalent (such as multiparatopic, and preferably biparatopic) construct preferably exhibits intramolecular binding compared to intermolecular binding.

[0631] In some of the preferred multiparatopic, and preferably biparatopic polypeptides of the invention, (i) at least one monovalent construct (and in particular at least one Nanobody) is used that is directed against the IL-6 binding site on IL-6R (and in particular against one or more of the 18 contact residues as described in Boulanger et al. 2003 (Science 300, 2101-2104) present in the extracellular D3 domain of the IL-6R, more preferably against amino acid residues Phe229 and Phe279 present in the extracellular D3 domain of the IL-6R) and/or that is capable of competing with IL-6 for binding to IL-6R; and at least one amino acid sequence (and in particular at least one Nanobody) is used that is directed against another antigenic determinant, epitope, part or domain of IL-6R. In such a preferred multiparatopic construct of the invention, the linker is most preferably such that the multiparatopic construct of the invention is capable of (simultaneously) binding to both the IL-6 binding site on IL-6R (and in particular to one or more of the 18 contact residues as described in Boulanger et al. 2003 (Science 300, 2101-2104) present in the extracellular D3 domain of the IL-6R, more preferably to amino acid residues Phe229 and Phe279 present in the extracellular D3 domain of the IL-6R) as well as to the other antigenic determinant, epitope, part or domain of IL-6R, again most preferably so as to allow binding with increased avidity and also intramolecular binding and/or recognition. Accordingly, also encompassed in the present invention is the use of a monovalent construct comprising an amino acid sequence (and in particular a Nanobody) that is directed against the IL-6 binding site on IL-6R (and in particular against one or more of the 18 contact residues as described in Boulanger et al. 2003 (Science 300, 2101-2104) present in the extracellular D3 domain of the IL-6R, more preferably against amino acid residues Phe229 and Phe279 present in the extracellular D3 domain of the IL-6R) and/or that is capable of competing with IL-6 for binding to IL-6R, as a binding domain or binding unit in providing and/or preparing a multiparatopic (such as biparatopic) construct, wherein the binding domains or binding units are linked via a linker such that the multiparatopic (such as biparatopic) construct preferably exhibits intramolecular binding compared to intermolecular binding.

[0632] In some of the preferred multiparatopic, and preferably biparatopic polypeptides of the invention, (i) at least one monovalent construct (and in particular at least one Nanobody) is used that is directed against the gp130 binding site on IL-6R and/or the IL-6/IL-6R complex and/or that is capable of competing with gp130 for binding to the IL-6/IL-6R complex; and at least one amino acid sequence (and in particular at least one Nanobody) is used that is directed against another antigenic determinant, epitope, part or domain of IL-6R. In such a preferred multiparatopic construct of the invention, the linker is most preferably such that the multiparatopic construct of the invention is capable of (simultaneously) binding to both the gp130 binding site on IL-6R and/or the IL-6/IL-6R complex as well as to the other antigenic determinant, epitope, part or domain of IL-6R, again most preferably so as to allow binding with increased avidity and also intramolecular binding and/or recognition. Accordingly, also encompassed in the present invention is the use of a monovalent construct comprising an amino acid (and in particular a Nanobody) that is directed against the gp130 binding site on IL-6R and/or the IL-6/IL-6R complex and/or that is capable of competing with gp130 for binding to the IL-6/IL-6R complex, as a binding domain or binding unit in providing and/or preparing a multiparatopic (such as biparatopic) construct, wherein the binding domains or binding units are linked via a linker such that the multiparatopic (such as biparatopic) construct preferably exhibits intramolecular binding compared to intermolecular binding.

[0633] In some of the most preferred multiparatopic, and preferably biparatopic polypeptides of the invention, (i) at least one monovalent construct (and in particular at least one Nanobody) is used that is directed against the Tocilizumab (MRA) binding site on IL-6R and/or that is capable of competing with Tocilizumab (MRA) for binding to IL-6R; and at least one amino acid sequence (and in particular at least one Nanobody) is used that is directed against another antigenic determinant, epitope, part or domain of IL-6R. In such a preferred multiparatopic construct of the invention, the linker is most preferably such that the multiparatopic construct of the invention is capable of (simultaneously) binding to both the Tocilizumab (MRA) binding site on IL-6R as well as to the other antigenic determinant, epitope, part or domain of IL-6R, again most preferably so as to allow binding with increased avidity and also intramolecular binding and/or recognition. Accordingly, also encompassed in the present invention is the use of a monovalent construct comprising an amino acid of the invention (and in particular a Nanobody) that is directed against the Tocilizumab (MRA) binding site on IL-6R and/or that is capable of competing with Tocilizumab (MRA) for binding to IL 6R, as a binding domain or binding unit in providing and/or preparing a multiparatopic (such as biparatopic) construct, wherein the binding domains or binding units are linked via a linker such that the multiparatopic (such as biparatopic) construct preferably exhibits intramolecular binding compared to intermolecular binding.

[0634] In some of the most preferred multiparatopic, and preferably biparatopic polypeptides of the invention, (i) at least one monovalent construct (and in particular at least one Nanobody) is used that is directed against the M182 binding site on IL-6R and/or that is capable of competing with M182 for binding to IL-6R; and at least one amino acid sequence (and in particular at least one Nanobody) is used that is directed against another antigenic determinant, epitope, part or domain of IL-6R. In such a preferred multiparatopic construct of the invention, the linker is most preferably such that the multiparatopic construct of the invention is capable of (simultaneously) binding to both the M182 binding site on IL-6R as well as the other antigenic determinant, epitope, part or domain of IL-6R, again most preferably so as to allow binding with increased avidity and also intramolecular binding and/or recognition. Accordingly, also encompassed in the present invention is the use of a monovalent construct comprising an amino acid of the invention (and in particular a Nanobody) that is directed against the M182 binding site on IL-6R and/or that is capable of competing with M182 for binding to IL-6R, as a binding domain or binding unit in providing and/or preparing a multiparatopic (such as biparatopic) construct, wherein the binding domains or binding units are linked via a linker such that the multiparatopic (such as biparatopic) construct preferably exhibits intramolecular binding compared to intermolecular binding.

[0635] In some of the most preferred multiparatopic, and preferably biparatopic polypeptides of the invention, (i) at least one monovalent construct (and in particular at least one Nanobody) is used that is directed against the BN-12 binding site on IL-6R and/or that is capable of competing with BN-12 for binding to IL-6R; and at least one amino acid sequence (and in particular at least one Nanobody) is used that is directed against another antigenic determinant, epitope, part or domain of IL-6R. In such a preferred multiparatopic construct of the invention, the linker is most preferably such that the multiparatopic construct of the invention is capable of (simultaneously) binding to both the BN-12 binding site on IL-6R as well as the other antigenic determinant, epitope, part or domain of IL-6R, again most preferably so as to allow binding with increased avidity and also intramolecular binding and/or recognition. Accordingly, also encompassed in the present invention is the use of a monovalent construct comprising an amino acid of the invention (and in particular a Nanobody) that is directed against the BN-12 binding site on IL-6R and/or that is capable of competing with BN-12 for binding to IL-6R, as a binding domain or binding unit in providing and/or preparing a multiparatopic (such as biparatopic) construct, wherein the binding domains or binding units are linked via a linker such that the multiparatopic (such as biparatopic) construct preferably exhibits intramolecular binding compared to intermolecular binding.

[0636] As discussed above, the at least one further amino acid sequence and/or Nanobody that is used as a binding domain or binding unit in providing and/or preparing a multiparatopic (such as biparatopic) construct of the invention may be any amino acid sequence and/or Nanobody that is directed against and/or capable of binding IL-6R.

[0637] In a preferred but non-limiting aspect, the at least one further amino acid sequence and/or Nanobody that is capable of binding to at least one other antigenic determinant or epitope, part or domain on IL-6R binds an eptiope present in the extracellular D1 domain; and/or said at least one further amino acid sequence and/or Nanobody will recognize and/or specifically bind IL-6R while not binding the hybrid IL-6R (as described in Example 3; SEQ ID NO: 131). Accordingly, in a preferred but non-limiting aspect, the amino acid sequence and/or Nanobody that is used as a binding domain or binding unit in providing and/or preparing a multiparatopic (such as biparatopic) construct of the invention may be directed against an epitope that lies in, forms part of, or overlaps with (i.e. in the primary or tertiary structure) or is in close proximity to (i.e. in the primary or tertiary structure) the D1 domain of IL-6R and/or may be capable of specifically binding IL-6R while not binding the hybrid IL-6R (as described in Example 3; SEQ ID NO: 131).

[0638] In another preferred but non-limiting aspect, the at least one further amino acid sequence and/or Nanobody that is capable of binding to at least one other antigenic determinant or epitope, part or domain on IL-6R binds an eptiope present in the extracellular D2 domain; and/or said at least one further amino acid sequence and/or Nanobody will recognize and/or specifically bind IL-6R while not binding the hybrid IL-6R (as described in Example 3; SEQ ID NO: 131). Accordingly, in a preferred but non-limiting aspect, the amino acid sequence and/or Nanobody that is used as a binding domain or binding unit in providing and/or preparing a multiparatopic (such as biparatopic) construct of the invention may be directed against an epitope that lies in, forms part of, or overlaps with (i.e. in the primary or tertiary structure) or is in close proximity to (i.e. in the primary or tertiary structure) the D2 domain of IL-6R and/or may be capable of specifically binding IL-6R as well as binding the hybrid IL-6R (as described in Example 3; SEQ ID NO: 131).

[0639] In another preferred but non-limiting aspect, the at least one further amino acid sequence and/or Nanobody that is capable of binding to at least one other antigenic determinant or epitope, part or domain on IL-6R binds an eptiope present in the extracellular D3 domain; and/or said at least one further amino acid sequence and/or Nanobody will recognize and/or specifically bind IL-6R while not binding the hybrid IL-6R (as described in Example 3; SEQ ID NO: 131). Accordingly, in a preferred but non-limiting aspect, the amino acid sequence and/or Nanobody that is used as a binding domain or binding unit in providing and/or preparing a multiparatopic (such as biparatopic) construct of the invention may be directed against an epitope that lies in, forms part of, or overlaps with (i.e. in the primary or tertiary structure) or is in close proximity to (i.e. in the primary or tertiary structure) the D3 domain of IL-6R and/or may be capable of specifically binding IL-6R as well as binding the hybrid IL-6R (as described in Example 3; SEQ ID NO: 131).

[0640] In some of the preferred multiparatopic, and preferably biparatopic polypeptides of the invention, (i) at least one monovalent construct (and in particular at least one Nanobody) is used that is directed against the IL-6 binding site on IL-6R (and in particular against one or more of the 18 contact residues as described in Boulanger et al. 2003 (Science 300, 2101-2104) present in the extracellular D3 domain of the IL-6R, more preferably against amino acid residues Phe229 and Phe279 present in the extracellular D3 domain of the IL-6R) and/or that is capable of competing with IL-6 for binding to IL-6R; and at least one amino acid sequence (and in particular at least one Nanobody) is used that is directed against an antigenic determinant or epitope on IL-6R that lies in, forms part of, or overlaps with (i.e. in the primary or tertiary structure) or is in close proximity to (i.e. in the primary or tertiary structure) the D1 domain of IL-6R; and/or that is capable of specifically binding IL-6R while not binding the hybrid IL-6R (as described in Example 3; SEQ ID NO: 131). In such a preferred multiparatopic construct of the invention, the linker is most preferably such that the multiparatopic construct of the invention is capable of (simultaneously) binding to both the IL-6 binding site on IL-6R (and in particular to one or more of the 18 contact residues as described in Boulanger et al. 2003 (Science 300, 2101-2104) present in the extracellular D3 domain of the IL-6R, more preferably to amino acid residues Phe229 and Phe279 present in the extracellular D3 domain of the IL-6R) as well as to the other antigenic determinant or epitope on IL-6R that lies in, forms part of, or overlaps with (i.e. in the primary or tertiary structure) or is in close proximity to (i.e. in the primary or tertiary structure) the D1 domain of IL-6R, again most preferably so as to allow binding with increased avidity and also intramolecular binding and/or recognition. Accordingly, also encompassed in the present invention is the use of a monovalent construct comprising an amino acid sequence (and in particular a Nanobody) that is directed against the IL-6 binding site on IL-6R (and in particular against one or more of the 18 contact residues as described in Boulanger et al. 2003 (Science 300, 2101-2104) present in the extracellular D3 domain of the IL-6R, more preferably against amino acid residues Phe229 and Phe279 present in the extracellular D3 domain of the IL-6R) and/or that is capable of competing with IL-6 for binding to IL-6R; and a monovalent construct comprising an amino acid sequence (and in particular a Nanobody) that is directed against another antigenic determinant or epitope on IL-6R that lies in, forms part of, or overlaps with (i.e. in the primary or tertiary structure) or is in close proximity to (i.e. in the primary or tertiary structure) the D1 domain of IL-6R; and/or that may be capable of specifically binding IL-6R while not binding the hybrid IL-6R (as described in Example 3; SEQ ID NO: 131), as a binding domain or binding unit in providing and/or preparing a multiparatopic (such as biparatopic) construct, wherein the binding domains or binding units are linked via a linker such that the multiparatopic (such as biparatopic) construct preferably exhibits intramolecular binding compared to intermolecular binding.

[0641] In some of the preferred multiparatopic, and preferably biparatopic polypeptides of the invention, (i) at least one monovalent construct (and in particular at least one Nanobody) is used that is directed against the IL-6 binding site on IL-6R (and in particular against one or more of the 18 contact residues as described in Boulanger et al. 2003 (Science 300, 2101-2104) present in the extracellular D3 domain of the IL-6R, more preferably against amino acid residues Phe229 and Phe279 present in the extracellular D3 domain of the IL-6R) and/or that is capable of competing with IL-6 for binding to IL-6R; and at least one amino acid sequence (and in particular at least one Nanobody) is used that is directed against an antigenic determinant or epitope on IL-6R that lies in, forms part of, or overlaps with (i.e. in the primary or tertiary structure) or is in close proximity to (i.e. in the primary or tertiary structure) the D2 domain of IL-6R; and/or that is capable of specifically binding IL-6R as well as the hybrid IL-6R (as described in Example 3; SEQ ID NO: 131). In such a preferred multiparatopic construct of the invention, the linker is most preferably such that the multiparatopic construct of the invention is capable of (simultaneously) binding to both the IL-6 binding site on IL-6R (and in particular to one or more of the 18 contact residues as described in Boulanger et al. 2003 (Science 300, 2101-2104) present in the extracellular D3 domain of the IL-6R, more preferably to amino acid residues Phe229 and Phe279 present in the extracellular D3 domain of the IL-6R) as well as to the other antigenic determinant or epitope on IL-6R that lies in, forms part of, or overlaps with (i.e. in the primary or tertiary structure) or is in close proximity to (i.e. in the primary or tertiary structure) the D2 domain of IL-6R, again most preferably so as to allow binding with increased avidity and also intramolecular binding and/or recognition. Accordingly, also encompassed in the present invention is the use of a monovalent construct comprising an amino acid sequence (and in particular a Nanobody) that is directed against the IL-6 binding site on IL-6R (and in particular against one or more of the 18 contact residues as described in Boulanger et al. 2003 (Science 300, 2101-2104) present in the extracellular D3 domain of the IL-6R, more preferably against amino acid residues Phe229 and Phe279 present in the extracellular D3 domain of the IL-6R) and/or that is capable of competing with IL-6 for binding to IL-6R; and a monovalent construct comprising an amino acid sequence (and in particular a Nanobody) that is directed against another antigenic determinant or epitope on IL-6R that lies in, forms part of, or overlaps with (i.e. in the primary or tertiary structure) or is in close proximity to (i.e. in the primary or tertiary structure) the D2 domain of IL-6R; and/or that may be capable of specifically binding IL-6R as well as the hybrid IL-6R (as described in Example 3; SEQ ID NO: 131), as a binding domain or binding unit in providing and/or preparing a multiparatopic (such as biparatopic) construct, wherein the binding domains or binding units are linked via a linker such that the multiparatopic (such as biparatopic) construct preferably exhibits intramolecular binding compared to intermolecular binding.

[0642] In some of the preferred multiparatopic, and preferably biparatopic polypeptides of the invention, (i) at least one monovalent construct (and in particular at least one Nanobody) is used that is directed against the IL-6 binding site on IL-6R (and in particular against one or more of the 18 contact residues as described in Boulanger et al. 2003 (Science 300, 2101-2104) present in the extracellular D3 domain of the IL-6R, more preferably against amino acid residues Phe229 and Phe279 present in the extracellular D3 domain of the IL-6R) and/or that is capable of competing with IL-6 for binding to IL-6R; and at least one amino acid sequence (and in particular at least one Nanobody) is used that is directed against an antigenic determinant or epitope on IL-6R that lies in, forms part of, or overlaps with (i.e. in the primary or tertiary structure) or is in close proximity to (i.e. in the primary or tertiary structure) the D3 domain of IL-6R; and/or that is capable of specifically binding IL-6R as well as the hybrid IL-6R (as described in Example 3; SEQ ID NO: 131). In such a preferred multiparatopic construct of the invention, the linker is most preferably such that the multiparatopic construct of the invention is capable of (simultaneously) binding to both the IL-6 binding site on IL-6R (and in particular to one or more of the 18 contact residues as described in Boulanger et al. 2003 (Science 300, 2101-2104) present in the extracellular D3 domain of the IL-6R, more preferably to amino acid residues Phe229 and Phe279 present in the extracellular D3 domain of the IL-6R) as well as to the other antigenic determinant or epitope on IL-6R that lies in, forms part of, or overlaps with (i.e. in the primary or tertiary structure) or is in close proximity to (i.e. in the primary or tertiary structure) the D3 domain of IL-6R, again most preferably so as to allow binding with increased avidity and also intramolecular binding and/or recognition. Accordingly, also encompassed in the present invention is the use of a monovalent construct comprising an amino acid sequence (and in particular a Nanobody) that is directed against the IL-6 binding site on IL-6R (and in particular against one or more of the 18 contact residues as described in Boulanger et al. 2003 (Science 300, 2101-2104) present in the extracellular D3 domain of the IL-6R, more preferably against amino acid residues Phe229 and Phe279 present in the extracellular D3 domain of the IL-6R) and/or that is capable of competing with IL-6 for binding to IL-6R; and a monovalent construct comprising an amino acid sequence (and in particular a Nanobody) that is directed against another antigenic determinant or epitope on IL-6R that lies in, forms part of, or overlaps with (i.e. in the primary or tertiary structure) or is in close proximity to (i.e. in the primary or tertiary structure) the D3 domain of IL-6R; and/or that may be capable of specifically binding IL-6R as well as the hybrid IL-6R (as described in Example 3; SEQ ID NO: 131), as a binding domain or binding unit in providing and/or preparing a multiparatopic (such as biparatopic) construct, wherein the binding domains or binding units are linked via a linker such that the multiparatopic (such as biparatopic) construct preferably exhibits intramolecular binding compared to intermolecular binding.

[0643] In some of the preferred multiparatopic, and preferably biparatopic polypeptides of the invention, (i) at least one monovalent construct (and in particular at least one Nanobody) is used that is directed against the gp130 binding site on IL-6R and/or the IL-6/IL-6R complex and/or that is capable of competing with gp130 for binding to the IL-6/IL-6R complex; and at least one amino acid sequence (and in particular at least one Nanobody) is used that is directed against an antigenic determinant or epitope on IL-6R that lies in, forms part of, or overlaps with (i.e. in the primary or tertiary structure) or is in close proximity to (i.e. in the primary or tertiary structure) the D1 domain of IL-6R; and/or that is capable of specifically binding IL-6R while not binding the hybrid IL-6R (as described in Example 3; SEQ ID NO: 131). In such a preferred multiparatopic construct of the invention, the linker is most preferably such that the multiparatopic construct of the invention is capable of (simultaneously) binding to both the gp130 binding site on IL-6R and/or the IL-6/IL-6R complex as well as to the antigenic determinant or epitope on IL-6R that lies in, forms part of, or overlaps with (i.e. in the primary or tertiary structure) or is in close proximity to (i.e. in the primary or tertiary structure) the D1 domain of IL-6R, again most preferably so as to allow binding with increased avidity and also intramolecular binding and/or recognition. Accordingly, also encompassed in the present invention is the use of a monovalent construct comprising an amino acid (and in particular a Nanobody) that is directed against the gp130 binding site on IL-6R and/or the IL-6/IL-6R complex and/or that is capable of competing with gp130 for binding to the IL-6/IL-6R complex, as a binding domain or binding unit in providing and/or preparing a multiparatopic (such as biparatopic) construct; and a monovalent construct comprising an amino acid (and in particular a Nanobody) that is directed against an antigenic determinant or epitope on IL-6R that lies in, forms part of, or overlaps with (i.e. in the primary or tertiary structure) or is in close proximity to (i.e. in the primary or tertiary structure) the D1 domain of IL-6R; and/or that is capable of specifically binding IL-6R while not binding the hybrid IL-6R (as described in Example 3; HQ ID NO: 131), wherein the binding domains or binding units are linked via a linker such that the multiparatopic (such as biparatopic) construct preferably exhibits intramolecular binding compared to intermolecular binding.

[0644] In some of the preferred multiparatopic, and preferably biparatopic polypeptides of the invention, (i) at least one monovalent construct (and in particular at least one Nanobody) is used that is directed against the gp130 binding site on IL-6R and/or the IL-6/IL-6R complex and/or that is capable of competing with gp130 for binding to the IL-6/IL-6R complex; and at least one amino acid sequence (and in particular at least one Nanobody) is used that is directed against an antigenic determinant or epitope on IL-6R that lies in, forms part of, or overlaps with (i.e. in the primary or tertiary structure) or is in close proximity to (i.e. in the primary or tertiary structure) the D2 domain of IL-6R; and/or that is capable of specifically binding IL-6R as well as the hybrid IL-6R (as described in Example 3; SEQ ID NO: 131). In such a preferred multiparatopic construct of the invention, the linker is most preferably such that the multiparatopic construct of the invention is capable of (simultaneously) binding to both the gp130 binding site on IL-6R and/or theft-6/IL-6R complex as well as to the antigenic determinant or epitope on IL-6R that lies in, forms part of, or overlaps with (i.e. in the primary or tertiary structure) or is in close proximity to (i.e. in the primary or tertiary structure) the D2 domain of IL-6R, again most preferably so as to allow binding with increased avidity and also intramolecular binding and/or recognition. Accordingly, also encompassed in the present invention is the use of a monovalent construct comprising an amino acid (and in particular a Nanobody) that is directed against the gp130 binding site on IL-6R and/or the IL-6/IL-6R complex and/or that is capable of competing with gp130 for binding to the IL-6/IL-6R complex, as a binding domain or binding unit in providing and/or preparing a multiparatopic (such as biparatopic) construct; and a monovalent construct comprising an amino acid (and in particular a Nanobody) that is directed against an antigenic determinant or epitope on IL-6R that lies in, forms part of, or overlaps with (i.e. in the primary or tertiary structure) or is in close proximity to (i.e. in the primary or tertiary structure) the D2 domain of IL-6R; and/or that is capable of specifically binding IL-6R as well as the hybrid IL-6R (as described in Example 3; SEQ ID NO: 131), wherein the binding domains or binding units are linked via a linker such that the multiparatopic (such as biparatopic) construct preferably exhibits intramolecular binding compared to intermolecular binding.

[0645] In some of the preferred multiparatopic, and preferably biparatopic polypeptides of the invention, (i) at least one monovalent construct (and in particular at least one Nanobody) is used that is directed against the gp130 binding site on IL-6R and/or the IL-6/IL-6R complex and/or that is capable of competing with gp130 for binding to the IL-6/IL-6R complex; and at least one amino acid sequence (and in particular at least one Nanobody) is used that is directed against an antigenic determinant or epitope on IL-6R that lies in, forms part of, or overlaps with (i.e. in the primary or tertiary structure) or is in close proximity to (i.e. in the primary or tertiary structure) the D3 domain of IL-6R; and/or that is capable of specifically binding IL-6R as well as the hybrid IL-6R (as described in Example 3; SEQ ID NO: 131). In such a preferred multiparatopic construct of the invention, the linker is most preferably such that the multiparatopic construct of the invention is capable of (simultaneously) binding to both the gp130 binding site on IL-6R and/or the IL-6/IL-6R complex as well as to the antigenic determinant or epitope on IL-6R that lies in, forms part of, or overlaps with (i.e. in the primary or tertiary structure) or is in close proximity to (i.e. in the primary or tertiary structure) the D3 domain of IL-6R, again most preferably so as to allow binding with increased avidity and also intramolecular binding and/or recognition. Accordingly, also encompassed in the present invention is the use of a monovalent construct comprising an amino acid (and in particular a Nanobody) that is directed against the gp130 binding site on IL-6R and/or the IL-6/IL-6R complex and/or that is capable of competing with gp130 for binding to the IL-6/IL-6R complex, as a binding domain or binding unit in providing and/or preparing a multiparatopic (such as biparatopic) construct; and a monovalent construct comprising an amino acid (and in particular a Nanobody) that is directed against an antigenic determinant or epitope on IL-6R that lies in, forms part of, or overlaps with (i.e. in the primary or tertiary structure) or is in close proximity to (i.e. in the primary or tertiary structure) the D3 domain of IL-6R; and/or that is capable of specifically binding IL-6R as well as the hybrid IL-6R (as described in Example 3; SEQ ID NO: 131), wherein the binding domains or binding units are linked via a linker such that the multiparatopic (such as biparatopic) construct preferably exhibits intramolecular binding compared to intermolecular binding.

[0646] In some of the most preferred multiparatopic, and preferably biparatopic polypeptides of the invention, (i) at least one monovalent construct (and in particular at least one Nanobody) is used that is directed against the Tocilizumab (MRA) binding site on IL-6R and/or that is capable of competing with Tocilizumab (MRA) for binding to IL-6R; and at least one amino acid sequence (and in particular at least one Nanobody) is used that is directed against an antigenic determinant or epitope on IL-6R that lies in, forms part of, or overlaps with (i.e. in the primary or tertiary structure) or is in close proximity to (i.e. in the primary or tertiary structure) the D1 domain of IL-6R; and/or that is capable of specifically binding IL-6R while not binding the hybrid IL-6R (as described in Example 3; SEQ ID NO: 131). In such a preferred multiparatopic construct of the invention, the linker is most preferably such that the multiparatopic construct of the invention is capable of (simultaneously) binding to both the Tocilizumab (MRA) binding site on IL-6R as well as to the antigenic determinant or epitope on IL-6R that lies in, forms part of, or overlaps with (i.e. in the primary or tertiary structure) or is in close proximity to (i.e. in the primary or tertiary structure) the D1 domain of IL-6R, again most preferably so as to allow binding with increased avidity and also intramolecular binding and/or recognition. Accordingly, also encompassed in the present invention is the use of a monovalent construct comprising an amino acid of the invention (and in particular a Nanobody) that is directed against the Tocilizumab (MRA) binding site on IL-6R and/or that is capable of competing with Tocilizumab (MRA) for binding to IL-6R; and a monovalent construct comprising an amino acid of the invention (and in particular a Nanobody) that is directed against an antigenic determinant or epitope on IL-6R that lies in, forms part of, or overlaps with (i.e. in the primary or tertiary structure) or is in close proximity to (i.e. in the primary or tertiary structure) the D1 domain of IL-6R; and/or that is capable of specifically binding IL-6R while not binding the hybrid IL-6R (as described in Example 3; SEQ ID NO: 131), as a binding domain or binding unit in providing and/or preparing a multiparatopic (such as biparatopic) construct, wherein the binding domains or binding units are linked via a linker such that the multiparatopic (such as biparatopic) construct preferably exhibits intramolecular binding compared to intermolecular binding.

[0647] In some of the most preferred multiparatopic, and preferably biparatopic polypeptides of the invention, (i) at least one monovalent construct (and in particular at least one Nanobody) is used that is directed against the Tocilizumab (MRA) binding site on IL-6R and/or that is capable of competing with Tocilizumab (MRA) for binding to IL-6R; and at least one amino acid sequence (and in particular at least one Nanobody) is used that is directed against an antigenic determinant or epitope on IL-6R that lies in, forms part of, or overlaps with (i.e. in the primary or tertiary structure) or is in close proximity to (i.e. in the primary or tertiary structure) the D2 domain of IL-6R; and/or that is capable of specifically binding IL-6R as well as the hybrid IL-6R (as described in Example 3; SEQ ID NO: 131). In such a preferred multiparatopic construct of the invention, the linker is most preferably such that the multiparatopic construct of the invention is capable of (simultaneously) binding to both the Tocilizumab (MRA) binding site on IL-6R as well as to the antigenic determinant or epitope on IL-6R that lies in, forms part of, or overlaps with (i.e. in the primary or tertiary structure) or is in close proximity to (i.e. in the primary or tertiary structure) the D2 domain of IL-6R, again most preferably so as to allow binding with increased avidity and also intramolecular binding and/or recognition. Accordingly, also encompassed in the present invention is the use of a monovalent construct comprising an amino acid of the invention (and in particular a Nanobody) that is directed against the Tocilizumab (MRA) binding site on IL-6R and/or that is capable of competing with Tocilizumab (MRA) for binding to IL-6R; and a monovalent construct comprising an amino acid of the invention (and in particular a Nanobody) that is directed against an antigenic determinant or epitope on IL-6R that lies in, forms part of, or overlaps with (i.e. in the primary or tertiary structure) or is in close proximity to (i.e. in the primary or tertiary structure) the D₂ domain of IL-6R; and/or that is capable of specifically binding IL-6R as well as the hybrid IL-6R (as described in Example 3; SEQ ID NO: 131), as a binding domain or binding unit in providing and/or preparing a multiparatopic (such as biparatopic) construct, wherein the binding domains or binding units are linked via a linker such that the multiparatopic (such as biparatopic) construct preferably exhibits intramolecular binding compared to intermolecular binding.

[0648] In some of the most preferred multiparatopic, and preferably biparatopic polypeptides of the invention, (i) at least one monovalent construct (and in particular at least one Nanobody) is used that is directed against the Tocilizumab (MRA) binding site on IL-6R and/or that is capable of competing with Tocilizumab (MRA) for binding to IL-6R; and at least one amino acid sequence (and in particular at least one Nanobody) is used that is directed against an antigenic determinant or epitope on IL-6R that lies in, forms part of, or overlaps with (i.e. in the primary or tertiary structure) or is in close proximity to (i.e. in the primary or tertiary structure) the D3 domain of IL-6R; and/or that is capable of specifically binding IL-6R as well as the hybrid IL-6R (as described in Example 3; SEQ ID NO: 131). In such a preferred multiparatopic construct of the invention, the linker is most preferably such that the multiparatopic construct of the invention is capable of (simultaneously) binding to both the Tocilizumab (MRA) binding site on IL-6R as well as to the antigenic determinant or epitope on IL-6R that lies in, forms part of, or overlaps with (i.e. in the primary or tertiary structure) or is in close proximity to (i.e. in the primary or tertiary structure) the D3 domain of IL-6R, again most preferably so as to allow binding with increased avidity and also intramolecular binding and/or recognition. Accordingly, also encompassed in the present invention is the use of a monovalent construct comprising an amino acid of the invention (and in particular a Nanobody) that is directed against the Tocilizumab (MRA) binding site on IL-6R and/or that is capable of competing with Tocilizumab (MRA) for binding to IL-6R; and a monovalent construct comprising an amino acid of the invention (and in particular a Nanobody) that is directed against an antigenic determinant or epitope on IL-6R that lies in, forms part of, or overlaps with (i.e. in the primary or tertiary structure) or is in close proximity to (i.e. in the primary or tertiary structure) the D3 domain of IL-6R; and/or that is capable of specifically binding IL-6R as well as the hybrid IL-6R (as described in Example 3; SEQ ID NO: 131), as a binding domain or binding unit in providing and/or preparing a multiparatopic (such as biparatopic) construct, wherein the binding domains or binding units are linked via a linker such that the multiparatopic (such as biparatopic) construct preferably exhibits intramolecular binding compared to intermolecular binding.

[0649] In some of the most preferred multiparatopic, and preferably biparatopic polypeptides of the invention, (i) at least one monovalent construct (and in particular at least one Nanobody) is used that is directed against the M182 binding site on IL-6R and/or that is capable of competing with M182 for binding to IL-6R; and at least one amino acid sequence (and in particular at least one Nanobody) is used that is directed against an antigenic determinant or epitope on IL-6R that lies in, forms part of, or overlaps with (i.e. in the primary or tertiary structure) or is in close proximity to (i.e. in the primary or tertiary structure) the D1 domain of IL-6R; and/or that is capable of specifically binding IL-6R while not binding the hybrid IL-6R (as described in Example 3; SEQ ID NO: 131). In such a preferred multiparatopic construct of the invention, the linker is most preferably such that the multiparatopic construct of the invention is capable of (simultaneously) binding to both the M182 binding site on IL-6R as well as the antigenic determinant or epitope on IL-6R that lies in, forms part of, or overlaps with (i.e. in the primary or tertiary structure) or is in close proximity to (i.e. in the primary or tertiary structure) the D1 domain of IL-6R, again most preferably so as to allow binding with increased avidity and also intramolecular binding and/or recognition. Accordingly, also encompassed in the present invention is the use of a monovalent construct comprising an amino acid of the invention (and in particular a Nanobody) that is directed against the M182 binding site on IL-6R and/or that is capable of competing with M182 for binding to IL-6R; and a monovalent construct comprising an amino acid of the invention (and in particular a Nanobody) that is directed against an antigenic determinant or epitope on IL-6R that lies in, forms part of, or overlaps with (i.e. in the primary or tertiary structure) or is in close proximity to (i.e. in the primary or tertiary structure) the D1 domain of IL-6R; and/or that is capable of specifically binding IL-6R while not binding the hybrid IL-6R (as described in Example 3; SEQ ID NO: 131), as a binding domain or binding unit in providing and/or preparing a multiparatopic (such as biparatopic) construct, wherein the binding domains or binding units are linked via a linker such that the multiparatopic (such as biparatopic) construct preferably exhibits intramolecular binding compared to intermolecular binding.

[0650] In some of the most preferred multiparatopic, and preferably biparatopic polypeptides of the invention, (i) at least one monovalent construct (and in particular at least one Nanobody) is used that is directed against the M182 binding site on IL-6R and/or that is capable of competing with M182 for binding to IL-6R; and at least one amino acid sequence (and in particular at least one Nanobody) is used that is directed against an antigenic determinant or epitope on IL-6R that lies in, forms part of, or overlaps with (i.e. in the primary or tertiary structure) or is in close proximity to (i.e. in the primary or tertiary structure) the D2 domain of IL-6R; and/or that is capable of specifically binding IL-6R as well as the hybrid IL-6R (as described in Example 3; SEQ ID NO: 131). In such a preferred multiparatopic construct of the invention, the linker is most preferably such that the multiparatopic construct of the invention is capable of (simultaneously) binding to both the M182 binding site on IL-6R as well as the antigenic determinant or epitope on IL-6R that lies in, forms part of, or overlaps with (i.e. in the primary or tertiary structure) or is in close proximity to (i.e. in the primary or tertiary structure) the D2 domain of IL-6R, again most preferably so as to allow binding with increased avidity and also intramolecular binding and/or recognition. Accordingly, also encompassed in the present invention is the use of a monovalent construct comprising an amino acid of the invention (and in particular a Nanobody) that is directed against the M182 binding site on IL-6R and/or that is capable of competing with M182 for binding to IL-6R; and a monovalent construct comprising an amino acid of the invention (and in particular a Nanobody) that is directed against an antigenic determinant or epitope on IL-6R that lies in, forms part of, or overlaps with (i.e. in the primary or tertiary structure) or is in close proximity to (i.e. in the primary or tertiary structure) the D2 domain of IL-6R; and/or that is capable of specifically binding IL-6R as well as the hybrid IL-6R (as described in Example 3; SEQ ID NO: 131), as a binding domain or binding unit in providing and/or preparing a multiparatopic (such as biparatopic) construct, wherein the binding domains or binding units are linked via a linker such that the multiparatopic (such as biparatopic) construct preferably exhibits intramolecular binding compared to intermolecular binding.

[0651] In some of the most preferred multiparatopic, and preferably biparatopic polypeptides of the invention, (i) at least one monovalent construct (and in particular at least one Nanobody) is used that is directed against the M182 binding site on IL-6R and/or that is capable of competing with M182 for binding to IL-6R; and at least one amino acid sequence (and in particular at least one Nanobody) is used that is directed against an antigenic determinant or epitope on IL-6R that lies in, forms part of, or overlaps with (i.e. in the primary or tertiary structure) or is in close proximity to (i.e. in the primary or tertiary structure) the D3 domain of IL-6R; and/or that is capable of specifically binding IL-6R as well as the hybrid IL-6R (as described in Example 3; SEQ ID NO: 131). In such a preferred multiparatopic construct of the invention, the linker is most preferably such that the multiparatopic construct of the invention is capable of (simultaneously) binding to both the M182 binding site on IL-6R as well as the antigenic determinant or epitope on IL-6R that lies in, forms part of, or overlaps with (i.e. in the primary or tertiary structure) or is in close proximity to (i.e. in the primary or tertiary structure) the D3 domain of IL-6R, again most preferably so as to allow binding with increased avidity and also intramolecular binding and/or recognition. Accordingly, also encompassed in the present invention is the use of a monovalent construct comprising an amino acid of the invention (and in particular a Nanobody) that is directed against the M182 binding site on IL-6R and/or that is capable of competing with M182 for binding to IL-6R; and a monovalent construct comprising an amino acid of the invention (and in particular a Nanobody) that is directed against an antigenic determinant or epitope on IL-6R that lies in, forms part of, or overlaps with (i.e. in the primary or tertiary structure) or is in close proximity to (i.e. in the primary or tertiary structure) the D3 domain of IL-6R; and/or that is capable of specifically binding IL-6R as well as the hybrid IL-6R (as described in Example 3; SEQ ID NO: 131), as a binding domain or binding unit in providing and/or preparing a multiparatopic (such as biparatopic) construct, wherein the binding domains or binding units are linked via a linker such that the multiparatopic (such as biparatopic) construct preferably exhibits intramolecular binding compared to intermolecular binding.

[0652] In some of the most preferred multiparatopic, and preferably biparatopic polypeptides of the invention, (i) at least one monovalent construct (and in particular at least one Nanobody) is used that is directed against the BN-12 binding site on IL-6R and/or that is capable of competing with BN-12 for binding to IL-6R; and at least one amino acid sequence (and in particular at least one Nanobody) is used that is directed against an antigenic determinant or epitope on IL-6R that lies in, forms part of, or overlaps with (i.e. in the primary or tertiary structure) or is in close proximity to (i.e. in the primary or tertiary structure) the D1 domain of IL-6R; and/or that is capable of specifically binding IL-6R while not binding the hybrid IL-6R (as described in Example 3; SEQ ID NO: 131). In such a preferred multiparatopic construct of the invention, the linker is most preferably such that the multiparatopic construct of the invention is capable of (simultaneously) binding to both the BN-12 binding site on IL-6R as well as the antigenic determinant or epitope on IL-6R that lies in, forms part of, or overlaps with (i.e. in the primary or tertiary structure) or is in close proximity to (i.e. in the primary or tertiary structure) the D1 domain of IL-6R, again most preferably so as to allow binding with increased avidity and also intramolecular binding and/or recognition. Accordingly, also encompassed in the present invention is the use of a monovalent construct comprising an amino acid of the invention (and in particular a Nanobody) that is directed against the BN-12 binding site on IL-6R and/or that is capable of competing with BN-12 for binding to IL-6R; and a monovalent construct comprising an amino acid of the invention (and in particular a Nanobody) that is directed against an antigenic determinant or epitope on IL-6R that lies in, forms part of, or overlaps with (i.e. in the primary or tertiary structure) or is in close proximity to (i.e. in the primary or tertiary structure) the D1 domain of IL-6R; and/or that is capable of specifically binding IL-6R while not binding the hybrid IL-6R (as described in Example 3; SEQ ID NO: 131), as a binding domain or binding unit in providing and/or preparing a multiparatopic (such as biparatopic) construct, wherein the binding domains or binding units are linked via a linker such that the multiparatopic (such as biparatopic) construct preferably exhibits intramolecular binding compared to intermolecular binding.

[0653] In some of the most preferred multiparatopic, and preferably biparatopic polypeptides of the invention, (i) at least one monovalent construct (and in particular at least one Nanobody) is used that is directed against the BN-12 binding site on IL-6R and/or that is capable of competing with BN-12 for binding to IL-6R; and at least one amino acid sequence (and in particular at least one Nanobody) is used that is directed against an antigenic determinant or epitope on IL-6R that lies in, forms part of, or overlaps with (i.e. in the primary or tertiary structure) or is in close proximity to (i.e. in the primary or tertiary structure) the D2 domain of IL-6R; and/or that is capable of specifically binding IL-6R as well as the hybrid IL-6R (as described in Example 3; SEQ ID NO: 131). In such a preferred multiparatopic construct of the invention, the linker is most preferably such that the multiparatopic construct of the invention is capable of (simultaneously) binding to both the BN-12 binding site on IL-6R as well as the antigenic determinant or epitope on IL-6R that lies in, forms part of, or overlaps with (i.e. in the primary or tertiary structure) or is in close proximity to (i.e. in the primary or tertiary structure) the D2 domain of IL-6R, again most preferably so as to allow binding with increased avidity and also intramolecular binding and/or recognition. Accordingly, also encompassed in the present invention is the use of a monovalent construct comprising an amino acid of the invention (and in particular a Nanobody) that is directed against the BN-12 binding site on IL-6R and/or that is capable of competing with BN-12 for binding to IL-6R; and a monovalent construct comprising an amino acid of the invention (and in particular a Nanobody) that is directed against an antigenic determinant or epitope on IL-6R that lies in, forms part of, or overlaps with (i.e. in the primary or tertiary structure) or is in close proximity to (i.e. in the primary or tertiary structure) the D2 domain of IL-6R; and/or that is capable of specifically binding IL-6R as well as the hybrid IL-6R (as described in Example 3; SEQ ID NO: 131), as a binding domain or binding unit in providing and/or preparing a multiparatopic (such as biparatopic) construct, wherein the binding domains or binding units are linked via a linker such that the multiparatopic (such as biparatopic) construct preferably exhibits intramolecular binding compared to intermolecular binding.

[0654] In some of the most preferred multiparatopic, and preferably biparatopic polypeptides of the invention, (i) at least one monovalent construct (and in particular at least one Nanobody) is used that is directed against the BN-12 binding site on IL-6R and/or that is capable of competing with BN-12 for binding to IL-6R; and at least one amino acid sequence (and in particular at least one Nanobody) is used that is directed against an antigenic determinant or epitope on IL-6R that lies in, forms part of, or overlaps with (i.e. in the primary or tertiary structure) or is in close proximity to (i.e. in the primary or tertiary structure) the D3 domain of IL-6R; and/or that is capable of specifically binding IL-6R as well as the hybrid IL-6R (as described in Example 3; SEQ ID NO: 131). In such a preferred multiparatopic construct of the invention, the linker is most preferably such that the multiparatopic construct of the invention is capable of (simultaneously) binding to both the BN-12 binding site on IL-6R as well as the antigenic determinant or epitope on IL-6R that lies in, forms part of, or overlaps with (i.e. in the primary or tertiary structure) or is in close proximity to (i.e. in the primary or tertiary structure) the D3 domain of IL-6R, again most preferably so as to allow binding with increased avidity and also intramolecular binding and/or recognition. Accordingly, also encompassed in the present invention is the use of a monovalent construct comprising an amino acid of the invention (and in particular a Nanobody) that is directed against the BN-12 binding site on IL-6R and/or that is capable of competing with BN-12 for binding to IL-6R; and a monovalent construct comprising an amino acid of the invention (and in particular a Nanobody) that is directed against an antigenic determinant or epitope on IL-6R that lies in, forms part of, or overlaps with (i.e. in the primary or tertiary structure) or is in close proximity to (i.e. in the primary or tertiary structure) the D3 domain of IL-6R; and/or that is capable of specifically binding IL-6R as well as the hybrid IL-6R (as described in Example 3; SEQ ID NO: 131), as a binding domain or binding unit in providing and/or preparing a multiparatopic (such as biparatopic) construct, wherein the binding domains or binding units are linked via a linker such that the multiparatopic (such as biparatopic) construct preferably exhibits intramolecular binding compared to intermolecular binding.

[0655] In some of the most preferred multiparatopic, and preferably biparatopic polypeptides of the invention, (i) at least one monovalent construct (and in particular at least one Nanobody) is used that is directed against the IL-6 binding site on IL-6R (and in particular one or more of the 18 contact residues as described in Boulanger et al. 2003 (Science 300, 2101-2104) present in the extracellular D3 domain of the IL-6R, more preferably amino acid residues Phe229 and Phe279 present in the extracellular D3 domain of the IL-6R) and/or that is capable of competing with IL-6 for binding to IL-6R; and at least one monovalent construct (and in particular at least one Nanobody) is used that is directed against the gp130 binding site on IL-6R and/or the IL-6/IL-6R complex and/or that is capable of competing with gp130 for binding to the IL-6/IL-6R complex. In such a preferred multiparatopic construct of the invention, the linker is most preferably such that the multiparatopic construct of the invention is capable of (simultaneously) binding to both the IL-6 binding site on IL-6R (and in particular one or more of the 18 contact residues as described in Boulanger et al. 2003 (Science 300, 2101-2104) present in the extracellular D3 domain of the IL-6R, more preferably amino acid residues Phe229 and Phe279 present in the extracellular D3 domain of the IL-6R) as well as the gp130 binding site on IL-6R and/or the IL-6/IL-6R complex, again most preferably so as to allow binding with increased avidity and also intramolecular binding and/or recognition. Accordingly, also encompassed in the present invention is the use of a monovalent construct comprising an amino acid sequence (and in particular a Nanobody) that is directed against the IL-6 binding site on IL-6R (and in particular one or more of the 18 contact residues as described in Boulanger et al. 2003 (Science 300, 2101-2104) present in the extracellular D3 domain of the IL-6R, more preferably amino acid residues Phe229 and Phe279 present in the extracellular D3 domain of the IL-6R) and/or that is capable of competing with IL-6 for binding to IL-6R, and a monovalent construct comprising an amino acid sequence (and in particular a Nanobody) that is directed against the gp130 binding site on IL-6R and/or the IL-6/IL-6R complex and/or that is capable of competing with gp130 for binding to the IL-6/IL-6R complex, as binding domains or binding units in providing and/or preparing a multiparatopic (such as a biparatopic) construct, wherein the binding domains or binding units are linked via a linker such that the multiparatopic (such as biparatopic) construct preferably exhibits intramolecular binding compared to intermolecular binding.

[0656] In some of the most preferred multiparatopic polypeptides of the invention, (i) at least one monovalent construct (and in particular at least one Nanobody) is used that is directed against the Tocilizumab (MRA) binding site on IL-6R and/or that is capable of competing with Tocilizumab (MRA) for binding to IL-6R; and at least one monovalent construct (and in particular at least one Nanobody) is used that is directed against the gp130 binding site on IL-6R and/or the IL-6/IL-6R complex and/or that is capable of competing with gp130 for binding to the IL-6/IL-6R complex. In such a preferred multiparatopic construct of the invention, the linker is most preferably such that the multiparatopic construct of the invention is capable of (simultaneously) binding to both the Tocilizumab (MRA) binding site on IL-6R as well as the gp130 binding site on IL-6R and/or the IL-6/IL-6R complex, again most preferably so as to allow binding with increased avidity and also intramolecular binding and/or recognition. Accordingly, also encompassed in the present invention is the use of a monovalent construct comprising an amino acid sequence (and in particular a Nanobody) that is directed against the Tocilizumab (MRA) binding site on IL-6R and/or that is capable of competing with Tocilizumab (MRA) for binding to IL-6R, and a monovalent construct comprising an amino acid sequence (and in particular a Nanobody) that is directed against the gp130 binding site on IL-6R and/or the IL-6/IL-6R complex and/or that is capable of competing with gp130 for binding to the IL-6/IL-6R complex, as binding domains or binding units in providing and/or preparing a multiparatopic (such as a biparatopic) construct, wherein the binding domains or binding units are linked via a linker such that the multiparatopic (such as biparatopic) construct preferably exhibits intramolecular binding compared to intermolecular binding.

[0657] In some of the most preferred multiparatopic polypeptides of the invention, (i) at least one monovalent construct (and in particular at least one Nanobody) is used that is directed against the BN-12 binding site on IL-6R and/or that is capable of competing with BN-12 for binding to IL-6R; and at least one monovalent construct (and in particular at least one Nanobody) is used that is directed against the gp130 binding site on IL-6R and/or the IL-6/IL-6R complex and/or that is capable of competing with gp130 for binding to the IL-6/IL-6R complex. In such a preferred multiparatopic construct of the invention, the linker is most preferably such that the multiparatopic construct of the invention is capable of (simultaneously) binding to both the BN-12 binding site on IL-6R as well as the gp130 binding site on IL-6R and/or the IL-6/IL-6R complex, again most preferably so as to allow binding with increased avidity and also intramolecular binding and/or recognition. Accordingly, also encompassed in the present invention is the use of a monovalent construct comprising an amino acid sequence (and in particular a Nanobody) that is directed against the BN-12 binding site on IL-6R and/or that is capable of competing with BN-12 for binding to IL-6R, and a monovalent construct comprising an amino acid sequence (and in particular a Nanobody) that is directed against the gp130 binding site on IL-6R and/or the IL-6/IL-6R complex and/or that is capable of competing with gp130 for binding to the IL-6/IL-6R complex, as binding domains or binding units in providing and/or preparing a multiparatopic (such as a biparatopic) construct, wherein the binding domains or binding units are linked via a linker such that the multiparatopic (such as biparatopic) construct preferably exhibits intramolecular binding compared to intermolecular binding.

[0658] In some of the most preferred multiparatopic polypeptides of the invention, (i) at least one monovalent construct (and in particular at least one Nanobody) is used that is directed against the IL-6 binding site on IL-6R (and in particular one or more of the 18 contact residues as described in Boulanger et al. 2003 (Science 300, 2101-2104) present in the extracellular D3 domain of the IL-6R, more preferably amino acid residues Phe229 and Phe279 present in the extracellular D3 domain of the IL-6R) and/or that is capable of competing with IL-6 for binding to IL-6R; and at least one monovalent construct (and in particular at least one Nanobody) is used that is directed against the M182 binding site on IL-6R and/or that is capable of competing with M182 for binding to IL-6R. In such a preferred multiparatopic construct of the invention, the linker is most preferably such that the multiparatopic construct of the invention is capable of (simultaneously) binding to both the IL-6 binding site on IL-6R (and in particular one or more of the 18 contact residues as described in Boulanger et al. 2003 (Science 300, 2101-2104) present in the extracellular D3 domain of the IL-6R, more preferably amino acid residues Phe229 and Phe279 present in the extracellular D3 domain of the IL-6R) as well as the M182 binding site on IL-6R, again most preferably so as to allow binding with increased avidity and also intramolecular binding and/or recognition. Accordingly, also encompassed in the present invention is the use of a monovalent construct comprising an amino acid sequence (and in particular a Nanobody) that is directed against the IL-6 binding site on IL-6R (and in particular one or more of the 18 contact residues as described in Boulanger et al. 2003 (Science 300, 2101-2104) present in the extracellular D3 domain of the IL-6R, more preferably amino acid residues Phe229 and Phe279 present in the extracellular D3 domain of the IL-6R) and/or that is capable of competing with IL-6 for binding to IL-6R, and a monovalent construct comprising an amino acid sequence (and in particular a Nanobody) that is directed against the M182 binding site on IL-6R and/or that is capable of competing with M182 for binding to IL-6R, as binding domains or binding units in providing and/or preparing a multiparatopic (such as a biparatopic) construct, wherein the binding domains or binding units are linked via a linker such that the multiparatopic (such as biparatopic) construct preferably exhibits intramolecular binding compared to intermolecular binding.

[0659] In some of the most preferred multiparatopic polypeptides of the invention, (i) at least one monovalent construct (and in particular at least one Nanobody) is used that is directed against the IL-6 binding site on IL-6R (and in particular one or more of the 18 contact residues as described in Boulanger et al. 2003 (Science 300, 2101-2104) present in the extracellular D3 domain of the IL-6R, more preferably amino acid residues Phe229 and Phe279 present in the extracellular D3 domain of the IL-6R) and/or that is capable of competing with IL-6 for binding to IL-6R; and at least one monovalent construct (and in particular at least one Nanobody) is used that is directed against the BN-12 binding site on IL-6R and/or that is capable of competing with BN-12 for binding to IL-6R. In such a preferred multiparatopic construct of the invention, the linker is most preferably such that the multiparatopic construct of the invention is capable of (simultaneously) binding to both the IL-6 binding site on IL-6R (and in particular one or more of the 18 contact residues as described in Boulanger et al. 2003 (Science 300, 2101-2104) present in the extracellular D3 domain of the IL-6R, more preferably amino acid residues Phe229 and Phe279 present in the extracellular D3 domain of the IL-6R) as well as the BN-12 binding site on IL-6R, again most preferably so as to allow binding with increased avidity and also intramolecular binding and/or recognition. Accordingly, also encompassed in the present invention is the use of a monovalent construct comprising an amino acid sequence (and in particular a Nanobody) that is directed against the IL-6 binding site on IL-6R (and in particular one or more of the 18 contact residues as described in Boulanger et al. 2003 (Science 300, 2101-2104) present in the extracellular D3 domain of the IL-6R, more preferably amino acid residues Phe229 and Phe279 present in the extracellular D3 domain of the IL-6R) and/or that is capable of competing with IL-6 for binding to IL-6R, and a monovalent construct comprising an amino acid sequence (and in particular a Nanobody) that is directed against the BN-12 binding site on IL-6R and/or that is capable of competing with BN-12 for binding to IL-6R, as binding domains or binding units in providing and/or preparing a multiparatopic (such as a biparatopic) construct, wherein the binding domains or binding units are linked via a linker such that the multiparatopic (such as biparatopic) construct preferably exhibits intramolecular binding compared to intermolecular binding.

[0660] In some of the most preferred multiparatopic polypeptides of the invention, (i) at least one monovalent construct (and in particular at least one Nanobody) is used that is directed against the Tocilizumab (MRA) binding site on IL-6R and/or that is capable of competing with Tocilizumab (MRA) for binding to IL-6R; and at least one monovalent construct (and in particular at least one Nanobody) is used that is directed against the M182 binding site on IL-6R and/or that is capable of competing with M182 for binding to IL-6R. In such a preferred multiparatopic construct of the invention, the linker is most preferably such that the multiparatopic construct of the invention is capable of (simultaneously) binding to both the Tocilizumab (MRA) binding site on IL-6R as well as the M182 binding site on IL-6R, again most preferably so as to allow binding with increased avidity and also intramolecular binding and/or recognition. Accordingly, also encompassed in the present invention is the use of a monovalent construct comprising an amino acid sequence (and in particular a Nanobody) that is directed against the Tocilizumab (MRA) binding site on IL-6R and/or that is capable of competing with Tocilizumab (MRA) for binding to IL-6R, and a monovalent construct comprising an amino acid sequence (and in particular a Nanobody) that is directed against the M182 binding site on IL-6R and/or that is capable of competing with M182 for binding to IL-6R, as binding domains or binding units in providing and/or preparing a multiparatopic (such as a biparatopic) construct, wherein the binding domains or binding units are linked via a linker such that the multiparatopic (such as biparatopic) construct preferably exhibits intramolecular binding compared to intermolecular binding.

[0661] In some of the most preferred multiparatopic polypeptides of the invention, (i) at least one monovalent construct (and in particular at least one Nanobody) is used that is directed against the Tocilizumab (MRA) binding site on IL-6R and/or that is capable of competing with Tocilizumab (MRA) for binding to IL-6R; and at least one monovalent construct (and in particular at least one Nanobody) is used that is directed against the BN-12 binding site on IL-6R and/or that is capable of competing with BN-12 for binding to IL-6R. In such a preferred multiparatopic construct of the invention, the linker is most preferably such that the multiparatopic construct of the invention is capable of (simultaneously) binding to both the Tocilizumab (MRA) binding site on IL-6R as well as the BN-12 binding site on IL-6R, again most preferably so as to allow binding with increased avidity and also intramolecular binding and/or recognition. Accordingly, also encompassed in the present invention is the use of a monovalent construct comprising an amino acid sequence (and in particular a Nanobody) that is directed against the Tocilizumab (MRA) binding site on IL-6R and/or that is capable of competing with Tocilizumab (MRA) for binding to IL-6R, and a monovalent construct comprising an amino acid sequence (and in particular a Nanobody) that is directed against the BN-12 binding site on IL-6R and/or that is capable of competing with BN-12 for binding to IL-6R, as binding domains or binding units in providing and/or preparing a multiparatopic (such as a biparatopic) construct, wherein the binding domains or binding units are linked via a linker such that the multiparatopic (such as biparatopic) construct preferably exhibits intramolecular binding compared to intermolecular binding.

[0662] In some of the most preferred multiparatopic polypeptides of the invention, (i) at least one monovalent construct (and in particular at least one Nanobody) is used that is directed against the BN-12 binding site on IL-6R and/or that is capable of competing with BN-12 for binding to IL-6R; and at least one monovalent construct (and in particular at least one Nanobody) is used that is directed against the M182 binding site on IL-6R and/or that is capable of competing with M182 for binding to IL-6R. In such a preferred multiparatopic construct of the invention, the linker is most preferably such that the multiparatopic construct of the invention is capable of (simultaneously) binding to both the BN-12 binding site on IL-6R as well as the M182 binding site on IL-6R, again most preferably so as to allow binding with increased avidity and also intramolecular binding and/or recognition. Accordingly, also encompassed in the present invention is the use of a monovalent construct comprising an amino acid sequence (and in particular a Nanobody) that is directed against the BN-12 binding site on IL-6R and/or that is capable of competing with BN-12 for binding to IL-6R, and a monovalent construct comprising an amino acid sequence (and in particular a Nanobody) that is directed against the M182 binding site on IL-6R and/or that is capable of competing with M182 for binding to IL-6R, as binding domains or binding units in providing and/or preparing a multiparatopic (such as a biparatopic) construct, wherein the binding domains or binding units are linked via a linker such that the multiparatopic (such as biparatopic) construct preferably exhibits intramolecular binding compared to intermolecular binding.

[0663] In a preferred aspect the monovalent constructs, amino acid sequences and/or Nanobodies used in the preparation of the multiparatopic, and preferably biparatopic polypeptides of the invention are monovalent constructs, amino acid sequences and/or Nanobodies of the invention as described herein. More preferably, the monovalent constructs, amino acid sequences and/or Nanobodies used in the preparation of the multiparatopic, and preferably biparatopic polypeptides of the invention are selected from SEQ ID NO's: 132-215. Accordingly, in some of the most preferred multiparatopic, and preferably biparatopic polypeptides of the invention, (i) at least one monovalent construct (and in particular at least one Nanobody) is used that is selected from SEQ ID NO's: 132-216; and at least one amino acid sequence (and in particular at least one Nanobody) is used that is directed against another antigenic determinant, epitope, part or domain of IL-6R. In such a preferred multiparatopic construct of the invention, the linker is most preferably such that the multiparatopic construct of the invention is capable of (simultaneously) binding to both the binding site on IL-6R for the amino acid sequence selected from SEQ ID NO's: 132-216 as well as to the other antigenic determinant, epitope, part or domain of IL-6R, again most preferably so as to allow binding with increased avidity and also intramolecular binding and/or recognition. Accordingly, also encompassed in the present invention is the use of a monovalent construct comprising an amino acid of the invention (and in particular a Nanobody) selected from SEQ ID NO's: 132-216, as a binding domain or binding unit in providing and/or preparing a multiparatopic (such as biparatopic) construct, wherein the binding domains or binding units are linked via a linker such that the multiparatopic (such as biparatopic) construct preferably exhibits intramolecular binding compared to intermolecular binding.

[0664] The present invention also relates to the use of a nucleic acid or nucleotide sequence that encodes a monovalent construct of the invention for the preparation of a genetic construct (as further defined herein) that encodes a multivalent (such as multiparatopic, and preferably biparatopic) construct. Also, as will be clear to the skilled person, to prepare such a genetic construct, encoding a multivalent (such as multiparatopic, and preferably biparatopic) construct of the invention, several nucleotide sequences, such as at least two nucleotide sequences encoding a monovalent construct of the invention and for example nucleic acids encoding one or more linkers can be linked together in a suitable manner. Such genetic constructs generally also comprises one or more elements of genetic constructs known per se, such as for example one or more suitable regulatory elements (such as a suitable promoter(s), enhancer(s), terminator(s), etc.) and the further elements of genetic constructs referred to herein.

[0665] Techniques for generating the nucleic acids of the invention will be clear to the skilled person and may for instance include, but are not limited to, automated DNA synthesis; site-directed mutagenesis; combining two or more naturally occurring and/or synthetic sequences (or two or more parts thereof), introduction of mutations that lead to the expression of a truncated expression product; introduction of one or more restriction sites (e.g. to create cassettes and/or regions that may easily be digested and/or ligated using suitable restriction enzymes), and/or the introduction of mutations by means of a PCR reaction using one or more “mismatched” primers. These and other techniques will be clear to the skilled person, and reference is again made to the standard handbooks, such as Sambrook et al. and Ausubel et al., mentioned above, as well as the Examples below.

[0666] In the above constructs, the one or more Nanobodies and/or other amino acid sequences may be directly linked to each other and/or suitably linked to each other via one or more linker sequences. Some suitable but non-limiting examples of such linkers will become clear from the further description herein.

[0667] It is encompassed within the scope of the invention that the length, the degree of flexibility and/or other properties of the linker(s) used (although not critical, as it usually is for linkers used in ScFv fragments) may have some influence on the properties of the final polypeptide of the invention, including but not limited to the affinity, specificity or avidity for IL-6R. Based on the disclosure herein, the skilled person will be able to determine the optimal linker(s) for use in a specific multiparatopic (preferably biparatopic) polypeptide of the invention, optionally after some limited routine experiments.

[0668] In the multiparatopic (preferably biparatopic) polypeptide of the invention that comprises Nanobodies directed against two or more (preferably two) different antigenic determinants on IL-6R (for example against different epitopes of IL-6R), the length and flexibility of the linker are preferably such that, when the multiparatopic (preferably biparatopic) polypeptide binds to IL-6R, at least two and preferably all of the Nanobodies that are present in the multiparatopic (preferably biparatopic) polypeptide can (simultaneously) bind to each of their intended antigenic determinants, epitopes, parts or domains, most preferably so as to allow binding with increased avidity and also intramolecular binding and/or recognition. Again, based on the disclosure herein, the skilled person will be able to determine the optimal linker(s) for use in a specific polypeptide of the invention, optionally after some limited routine experiments.

[0669] For example, as further described herein, some of the most preferred multiparatopic (preferably biparatopic) polypeptides of the invention comprise (i) at least one amino acid sequence (and in particular at least one Nanobody) that is directed against the IL-6 binding site on IL-6R (and in particular one or more of the 18 contact residues as described in Boulanger et al. 2003 (Science 300, 2101-2104) present in the extracellular D3 domain of the IL-6R, more preferably amino acid residues Phe229 and Phe279 present in the extracellular D3 domain of the IL-6R) and/or that is capable of competing with IL-6 for binding to IL-6R; and at least one amino acid sequence (and in particular at least one Nanobody) that is directed against the gp130 binding site on IL-6R and/or the IL-6/IL-6R complex and/or that is capable of competing with gp130 for binding to the IL-6/IL-6R complex. In such a preferred multiparatopic (preferably biparatopic) polypeptide of the invention, the linker is most preferably such that the multiparatopic (preferably biparatopic) polypeptide of the invention is capable of (simultaneously) binding to both the IL-6 binding site on IL-6R (and in particular one or more of the 18 contact residues as described in Boulanger et al. 2003 (Science 300, 2101-2104) present in the extracellular D3 domain of the IL-6R, more preferably amino acid residues Phe229 and Phe279 present in the extracellular D3 domain of the IL-6R) as well as the gp130 binding site on IL-6R and/or the IL-6/IL-6R complex, again most preferably so as to allow binding with increased avidity and also intramolecular binding and/or recognition. Such multiparatopic (preferably biparatopic) polypeptides of the invention with such a linker form a particularly preferred aspect of the invention, and examples of such a linker are given in the Examples below. For example, when such a linker is a Gly-Ser linker (for example, a Gly-Ser linker as described in the Examples), it preferably has a length of at least 8 or 9 amino acid residues, such as at least 10, at least 15, at least 20 or at least 30 or 35 amino acid residues. The maximum length is not especially critical, but for practical considerations (such as ease of cloning and expression) the linker is preferably no longer than 75 amino acid residues, more preferably less than 50 amino acid residues. For example, Gly-Ser linkers (such as the Gly-Ser linkers as described in the Examples) of between 20 and 40 amino acid residues, such as about 25, 30 or 35 amino acid residues, may be particularly suited. Based on the disclosure herein, the skilled person will be able to determine other suitable linkers, it being understood that the optimal length of each linker may also depend on the amino acid composition of the linker that is envisaged for use. Some preferred linkers for use in the polypeptides of the invention are given in SEQ ID NO's: 951-956 (Table A-8).

[0670] Optimal linker lengths in biparatopic, triparatopic or multiparatopic polypeptides of the invention can, for example, be designed in silico with any method for protein design known in the art or disclosed herein. Optimal linker lengths, for example obtained by in silico design, can further be verified experimentally by binding and competition assays as will be known to the skilled person and/or described herein. Optimal linker lengths in biparatopic, triparatopic or multiparatopic polypeptides may also be determined using the screening method for determining optimal linker length as described herein.

[0671] The choice of linker length in biparatopic, triparatopic or multiparatopic polypeptides of the invention can also be such that only a limited epitope space on the antigen is covered. Linker length restriction can, for example, help to avoid targeting epitopes which should not be neutralized (e.g. those essential for a function of the antigen) or to target regions relatively adjacent to a first ‘guiding’ Nanobody.

[0672] The choice of the format (N- or C-terminal position of the different Nanobodies) of the biparatopic, triparatopic or multiparatopic polypeptides of the invention and linker length can also be used to obtain molecules that bind avidly to the target antigen (via two, or more, binding sites), yet are purposely not agonistic. By optimising the format and linker length and composition, the binding sites can be positioned in such way that simultaneous binding of two or more Nanobodies to the same target antigen (i.e. intramolecular binding) will be highly favoured compared to binding to separate antigens in proximity of one another.

[0673] It is also within the scope of the invention that the linker(s) used confer one or more other favourable properties or functionality to the polypeptides of the invention, and/or provide one or more sites for the formation of derivatives and/or for the attachment of functional groups (e.g. as described herein for the derivatives of the Nanobodies of the invention). For example, linkers containing one or more charged amino acid residues (see Table A-2 above) can provide improved hydrophilic properties, whereas linkers that form or contain small epitopes or tags can be used for the purposes of detection, identification and/or purification. Again, based on the disclosure herein, the skilled person will be able to determine the optimal linkers for use in a specific polypeptide of the invention, optionally after some limited routine experiments.

[0674] Finally, when two or more linkers are used in the polypeptides of the invention, these linkers may be the same or different. Again, based on the disclosure herein, the skilled person will be able to determine the optimal linkers for use in a specific polypeptide of the invention, optionally after some limited routine experiments.

[0675] Usually, for easy of expression and production, a polypeptide of the invention will be a linear polypeptide. However, the invention in its broadest sense is not limited thereto. For example, when a polypeptide of the invention comprises three of more Nanobodies, it is possible to link them by use of a linker with three or more “arms”, which each “arm” being linked to an amino acid sequence or Nanobody, so as to provide a “star-shaped” construct. It is also possible, although usually less preferred, to use circular constructs.

[0676] In one specific aspect of the invention, a biparatopic (or multiparatopic) polypeptide of the invention, an amino acid sequence of the invention, a Nanobody of the invention or a compound, construct or polypeptide of the invention comprising at least one Nanobody of the invention may have an increased half-life, compared to the corresponding biparatopic (or multiparatopic) polypeptide, amino acid sequence or Nanobody. Some preferred, but non-limiting examples of such biparatopic (or multiparatopic) polypeptides, amino acid sequences or Nanobodies, compounds and polypeptides of the invention will become clear to the skilled person based on the further disclosure herein, and for example comprise biparatopic (or multiparatopic) polypeptides of the invention, amino acid sequences of the invention or Nanobodies of the invention that have been chemically modified to increase the half-life thereof (for example, by means of pegylation); biparatopic (or multiparatopic) polypeptides of the invention, amino acid sequences of the invention or Nanobodies of the invention that comprise at least one additional binding site for binding to a serum protein (such as serum albumin, see for example EP 0 368 684 B1, page 4); or biparatopic (or multiparatopic) polypeptides of the invention, amino acid sequences of the invention or Nanobodies of the invention that comprise at least one biparatopic (or multiparatopic) polypeptide of the invention, amino acid sequence of the invention or Nanobody of the invention of the invention that is linked to at least one moiety (and in particular at least one amino acid sequence) that increases the half-life of the biparatopic (or multiparatopic) polypeptide of the invention, amino acid sequence of the invention or Nanobody of the invention. Examples of biparatopic (or multiparatopic) polypeptides of the invention, amino acid sequences of the invention or Nanobodies of the invention that comprise such half-life extending moieties or amino acid sequences will become clear to the skilled person based on the further disclosure herein; and for example include, without limitation, biparatopic (or multiparatopic) polypeptides of the invention, amino acid sequences of the invention or Nanobodies of the invention which are suitable linked to one or more serum proteins or fragments thereof (such as serum albumin or suitable fragments thereof) or to one or more binding units that can bind to serum proteins (such as, for example, Nanobodies or (single) domain antibodies that can bind to serum proteins such as serum albumin, serum immunoglobulins such as IgG, or transferrine); biparatopic (or multiparatopic) polypeptides of the invention, amino acid sequences of the invention or Nanobodies of the invention linked to an Fc portion (such as a human Fc) or a suitable part or fragment thereof; or biparatopic (or multiparatopic) polypeptides of the invention, amino acid sequences of the invention or Nanobodies of the invention that are suitable linked to one or more small proteins or peptides that can bind to serum proteins (such as, without limitation, the proteins and peptides described in WO 91/01743, WO 01/45746, WO 02/076489 and to WO 2008/068280.

[0677] Again, as will be clear to the skilled person, such biparatopic (or multiparatopic) polypeptides, amino acid sequences, Nanobodies, compounds, constructs or polypeptides may contain one or more additional groups, residues, moieties or binding units, such as one or more further amino acid sequences and in particular one or more additional Nanobodies (i.e. not directed against IL-6R), so as to provide a tri- of multispecific Nanobody construct.

[0678] Generally, the biparatopic (or multiparatopic) polypeptides of the invention, amino acid sequences of the invention or Nanobody of the invention (or compounds, constructs or polypeptides comprising the same) with increased half-life preferably have a half-life that is at least 1.5 times, preferably at least 2 times, such as at least 5 times, for example at least 10 times or more than 20 times, greater than the half-life of the corresponding biparatopic (or multiparatopic) polypeptide of the invention per se, amino acid sequence of the invention per se or Nanobody of the invention per se. For example, the biparatopic (or multiparatopic) polypeptides, amino acid sequences, Nanobodies, compounds, constructs or polypeptides of the invention with increased half-life may have a half-life that is increased with more than 1 hours, preferably more than 2 hours, more preferably more than 6 hours, such as more than 12 hours, or even more than 24, 48 or 72 hours, compared to the corresponding biparatopic (or multiparatopic) polypeptide of the invention per se, amino acid sequence of the invention per se or Nanobody of the invention per se.

[0679] In a preferred, but non-limiting aspect of the invention, such biparatopic (or multiparatopic) polypeptides of the invention, amino acid sequences of the invention or Nanobodies of the invention, compounds, constructs or polypeptides of the invention exhibit a serum half-life in human of at least about 12 hours, preferably at least 24 hours, more preferably at least 48 hours, even more preferably at least 72 hours or more. For example, biparatopic (or multiparatopic) polypeptides of the invention, amino acid sequences of the invention, Nanobodies of the invention, compounds or polypeptides of the invention may have a half-life of at least 5 days (such as about 5 to 10 days), preferably at least 9 days (such as about 9 to 14 days), more preferably at least about 10 days (such as about 10 to 15 days), or at least about 11 days (such as about 11 to 16 days), more preferably at least about 12 days (such as about 12 to 18 days or more), or more than 14 days (such as about 14 to 19 days).

[0680] In another aspect of the invention, a biparatopic (or multiparatopic) polypeptide of the invention, amino acid sequence of the invention or Nanobody of the invention (or compounds, constructs or polypeptides comprising the same) is linked (optionally via one or more suitable linker sequences) to one or more (such as two and preferably one) amino acid sequences that allow the resulting polypeptide of the invention to cross the blood brain barrier. In particular, said one or more amino acid sequences that allow the resulting polypeptides of the invention to cross the blood brain barrier may be one or more (such as two and preferably one) Nanobodies, such as the Nanobodies described in WO 02/057445, of which FC44 (SEQ ID NO: 189 of WO 06/040153) and FC5 (SEQ ID NO: 190 of WO 06/040154) are preferred examples.

[0681] In particular, polypeptides comprising one or more biparatopic (or multiparatopic) polypeptides of the invention, amino acid sequences of the invention or Nanobodies of the invention (or compounds, constructs or polypeptides comprising the same) are preferably such that they:
[0682] bind to IL-6R with a dissociation constant (K_{D}) of 10⁻⁵ to 10⁻¹² moles/liter or less, and preferably 10⁻⁷ to 10⁻¹² moles/liter or less and more preferably 10⁻⁸ to 10¹² moles/liter (i.e. with an association constant (K_{A}) of 10⁵ to 10¹² liter/moles or more, and preferably 10⁷ to 10¹² liter/moles or more and more preferably 10⁸ to 10¹² liter/moles);
   and/or such that they:
[0683] bind to IL-6R with a kₒₙ-rate of between 10² M⁻¹s⁻¹ to about 10⁷ M⁻¹s⁻¹, preferably between 10³ M⁻¹s⁴ and 10⁷ M⁻¹s⁻¹, more preferably between 10⁴ M⁻¹s⁴ and 10⁷ M⁻¹s⁻¹, such as between 10⁵ M⁻¹s⁻¹ and 10⁷ M⁻¹s⁻¹;
   and/or such that they:
[0684] bind to IL-6R with a k_{off} rate between 1 s⁻¹ (t_{1/2}=0.69 s) and 10⁻⁶ s⁻¹ (providing a near irreversible complex with a t_{1/2} of multiple days), preferably between 10⁻² s⁻¹ and 10⁻⁶ s⁻¹, more preferably between 10⁻³ s⁻¹ and 10⁻⁶ s⁻¹, such as between 10⁻⁴ s⁻¹ and 10⁻⁶ s⁻¹.

[0685] Preferably, a polypeptide that contains only one amino acid sequence of the invention is preferably such that it will bind to IL-6R with an affinity less than 500 nM, preferably less than 200 nM, more preferably less than 10 nM, such as less than 500 μM. In this respect, it will be clear to the skilled person that a polypeptide that contains two or more Nanobodies of the invention may bind to IL-6R with an increased avidity, compared to a polypeptide that contains only one amino acid sequence of the invention.

[0686] Some preferred IC₅₀ values for binding of the amino acid sequences or polypeptides of the invention to IL-6R will become clear from the further description and examples herein.

[0687] Other polypeptides according to this preferred aspect of the invention may for example be chosen from the group consisting of amino acid sequences that have more than 80%, preferably more than 90%, more preferably more than 95%, such as 99% or more “sequence identity” (as defined herein) with one or more of the amino acid sequences of SEQ ID NO's: 812-947] (see Tables A-4 to A-6), in which the Nanobodies comprised within said polypeptides are preferably as further defined herein.

[0688] Another aspect of this invention relates to a nucleic acid that encodes an amino acid sequence of the invention (such as a Nanobody of the invention) or a polypeptide of the invention comprising the same. Again, as generally described herein for the nucleic acids of the invention, such a nucleic acid may be in the form of a genetic construct, as defined herein.

[0689] In another aspect, the invention relates to host or host cell that expresses or that is capable of expressing an amino acid sequence (such as a Nanobody) of the invention and/or a polypeptide of the invention comprising the same; and/or that contains a nucleic acid of the invention. Some preferred but non-limiting examples of such hosts or host cells will become clear from the further description herein.

[0690] Another aspect of the invention relates to a product or composition containing or comprising at least one amino acid sequence and/or Nanobody of the invention, at least one polypeptide of the invention and/or at least one nucleic acid of the invention, and optionally one or more further components of such compositions known per se, i.e. depending on the intended use of the composition. Such a product or composition may for example be a pharmaceutical composition (as described herein), a veterinary composition or a product or composition for diagnostic use (as also described herein). Some preferred but non-limiting examples of such products or compositions will become clear from the further description herein.

[0691] The invention further relates to methods for preparing or generating the amino acid sequences, compounds, constructs, polypeptides, nucleic acids, host cells, products and compositions described herein. Some preferred but non-limiting examples of such methods will become clear from the further description herein.

[0692] Especially encompassed within the present invention are methods for preparing and generating multiparatopic (such as e.g. biparatopic, triparatopic, etc.) polypeptides of the invention.

[0693] Without being limiting, a method for preparing and generating biparatopic polypeptides of the invention may comprise at least the steps of:
[0694] a) providing a nucleic acid sequence encoding an IL-6R binding amino acid sequence fused to a set, collection or library of nucleic acid sequences encoding amino acid sequences;
[0695] b) screening said set, collection or library of nucleic acid sequences for nucleic acid sequences that encode an amino acid sequence that can bind to and/or has affinity for an antigenic determinant on IL-6R different from the antigenic determinant recognized by the IL-6R binding amino acid sequence;
   and
[0696] c) isolating the nucleic acid sequence encoding the IL-6R binding amino acid sequence fused to the nucleic acid sequence obtained in b), followed by expressing the encoded amino acid sequence.

[0697] The nucleic acid sequence encoding the biparatopic polypeptide obtained in the method above, can subsequently be fused to one or more further sets, collections or libraries of nucleic acid sequences encoding amino acid sequences and again screened for nucleic acid sequences that encode an amino acid sequence that can bind to and/or has affinity for an antigenic determinant on IL-6R different from the antigenic determinant of the IL-6R binding amino acid sequence and the antigenic determinant of b) in order to obtain a triparatopic or multiparatopic amino acid sequence respectively.

[0698] In such a method, the set, collection or library of nucleic acid sequences encoding amino acid sequences may for example be a set, collection or library of nucleic acid sequences encoding a naïve set, collection or library of immunoglobulin sequences; a set, collection or library of nucleic acid sequences encoding a synthetic or semi-synthetic set, collection or library of immunoglobulin sequences; and/or a set, collection or library of nucleic acid sequences encoding a set, collection or library of immunoglobulin sequences that have been subjected to affinity maturation.

[0699] Also, in such a method, the set, collection or library of nucleic acid sequences may encode a set, collection or library of heavy chain variable domains (such as V_{H} domains or V_{HH} domains) or of light chain variable domains. For example, the set, collection or library of nucleic acid sequences may encode a set, collection or library of domain antibodies or single domain antibodies, or a set, collection or library of amino acid sequences that are capable of functioning as a domain antibody or single domain antibody.

[0700] In a preferred aspect of this method, the set, collection or library of nucleic acid sequences may be an immune set, collection or library of nucleic acid sequences, for example derived from a mammal that has been suitably immunized with IL-6R or with a suitable antigenic determinant based thereon or derived therefrom, such as an antigenic part, fragment, region, domain, loop or other epitope thereof. In one particular aspect, said antigenic determinant may be an extracellular part, region, domain, loop or other extracellular epitope(s).

[0701] The set, collection or library of nucleic acid sequences may for example encode an immune set, collection or library of heavy chain variable domains or of light chain variable domains. In one specific aspect, the set, collection or library of nucleotide sequences may encode a set, collection or library of V_{HH} sequences.

[0702] In the above methods, the nucleic acid sequence encoding an IL-6R binding amino acid sequence fused to the set, collection or library of nucleotide sequences may be displayed on a phage, phagemid, ribosome or suitable micro-organism (such as yeast), such as to facilitate screening. Suitable methods, techniques and host organisms for displaying and screening (a set, collection or library of) nucleotide sequences encoding amino acid sequences will be clear to the person skilled in the art, for example on the basis of the further disclosure herein. Reference is also made to the review by Hoogenboom in Nature Biotechnology, 23, 9, 1105-1116 (2005).

[0703] According to a particularly preferred aspect, a method for preparing and generating biparatopic polypeptides of the invention may comprise at least the steps of:
[0704] a) providing a set, collection or library of nucleic acid sequences, in which each nucleic acid sequence in said set, collection or library encodes a fusion protein that comprises a first amino acid sequence that can bind to and/or has affinity for a first antigenic determinant, part, domain or epitope on IL-6R that is fused (optionally via a linker sequence) to a second amino acid sequence, in which essentially each second amino acid sequence (or most of these) is a different member of a set, collection or library of different amino acid sequences;
[0705] b) screening said set, collection or library of nucleic acid sequences for nucleic acid sequences that encode an amino acid sequence that can bind to and/or has affinity for a second antigenic determinant, part, domain or epitope on IL-6R different from the first antigenic determinant, part, domain or epitope on IL-6R;
   and
[0706] c) isolating the nucleic acid sequences that encode an amino acid sequence that can bind to and/or has affinity for a second antigenic determinant, part, domain or epitope on IL-6R different from the first antigenic determinant, part, domain or epitope on IL-6R, obtained in b), optionally followed by expressing the encoded amino acid sequence.

[0707] In this preferred method, the first amino acid sequence in the fusion protein encoded by said set collection or library of nucleic acid sequences may be the same amino acid sequence for all members of the set, collection or library of nucleic acid sequences encoding the fusion protein; or the first amino acid sequence in the fusion protein encoded by said set collection or library of nucleic acid sequences may also be a member of a set collection or library of different amino acid sequences.

[0708] Again, in such a method, the set, collection or library of nucleic acid sequences encoding amino acid sequences that form part of the fusion protein may for example be a set, collection or library of nucleic acid sequences encoding a naïve set, collection or library of immunoglobulin sequences; a set, collection or library of nucleic acid sequences encoding a synthetic or semi-synthetic set, collection or library of immunoglobulin sequences; and/or a set, collection or library of nucleic acid sequences encoding a set, collection or library of immunoglobulin sequences that have been subjected to affinity maturation.

[0709] Also, in such a method, the set, collection or library of nucleic acid sequences may encode a set, collection or library of heavy chain variable domains (such as V_{H} domains or V_{HH} domains) or of light chain variable domains. For example, the set, collection or library of nucleic acid sequences may encode a set, collection or library of domain antibodies or single domain antibodies, or a set, collection or library of amino acid sequences that are capable of functioning as a domain antibody or single domain antibody.

[0710] In a preferred aspect of this method, the set, collection or library of nucleic acid sequences may be an immune set, collection or library of nucleic acid sequences, for example derived from a mammal that has been suitably immunized with IL-6R or with a suitable antigenic determinant based thereon or derived therefrom, such as an antigenic part, fragment, region, domain, loop or other epitope thereof. In one particular aspect, said antigenic determinant may be an extracellular part, region, domain, loop or other extracellular epitope(s).

[0711] The set, collection or library of nucleic acid sequences may for example encode an immune set, collection or library of heavy chain variable domains or of light chain variable domains. In one specific aspect, the set, collection or library of nucleotide sequences may encode a set, collection or library of V_{HH} sequences.

[0712] In the above methods, the set, collection or library of nucleotide sequences may be displayed on a phage, phagemid, ribosome or suitable micro-organism (such as yeast), such as to facilitate screening. Suitable methods, techniques and host organisms for displaying and screening (a set, collection or library of) nucleotide sequences encoding amino acid sequences will be clear to the person skilled in the art, for example on the basis of the further disclosure herein. Reference is also made to the review by Hoogenboom in Nature Biotechnology, 23, 9, 1105-1116 (2005).

[0713] In step b), the set, collection or library of nucleic acid sequences may also be screened for nucleic acid sequences that encode an amino acid sequence that can bind to and/or has affinity for both the first antigenic determinant, part, domain or epitope on IL-6R and the second antigenic determinant, part, domain or epitope on IL-6R. This may for example be performed in subsequent steps (i.e. by in a first step screening or selecting for nucleic acid sequences that encode an amino acid sequence that can bind to and/or has affinity for the second antigenic determinant, part, domain or epitope on IL-6R, and subsequently in a second step selecting or screening for nucleic acid sequences that encode an amino acid sequence that can bind to and/or has affinity for the first antigenic determinant, part, domain or epitope on IL-6R; or visa versa) or in a single step (i.e. by simultaneously screening or selecting for nucleic acid sequences that encode an amino acid sequence that can bind to and/or has affinity for both the first antigenic determinant, part, domain or epitope on IL-6R and the second antigenic determinant, part, domain or epitope on IL-6R).

[0714] In a preferred aspect of the above method, the first amino acid sequence used in step a) is preferably such that (i) it can bind to and/or has affinity for the IL-6 binding site on IL-6R (and may in particular be directed against one or more of the 18 contact residues as described in Boulanger et al. 2003 (Science 300, 2101-2104) present in the extracellular D3 domain of the IL-6R, more preferably amino acid residues Phe229 and Phe279 present in the extracellular D3 domain of the IL-6R) and/or (ii) it competes with IL-6 for binding to IL-6R; and in step b), the set, collection or library of nucleic acid sequences is screened for nucleic acid sequences that encode (i) an amino acid sequence that can bind to and/or has affinity for another antigenic determinant, part, domain or epitope on IL-6R different from the first antigenic determinant, part, domain or epitope on IL-6R.

[0715] Alternatively, the first amino acid sequence used in step a) is preferably such that (i) it can bind to and/or has affinity for any antigenic determinant, part, domain or epitope on IL-6R; and in step b), the set, collection or library of nucleic acid sequences is screened for nucleic acid sequences that encode (i) an amino acid sequence that can bind to and/or has affinity for the IL-6 binding site on IL-6R (and may in particular be directed against one or more of the 18 contact residues as described in Boulanger et al. 2003 (Science 300, 2101-2104) present in the extracellular D3 domain of the IL-6R, more preferably amino acid residues Phe229 and Phe279 present in the extracellular D3 domain of the IL-6R) and/or (ii) an amino acid sequence that can compete with IL-6 for binding to IL-6R.

[0716] In another preferred aspect of the above method, the first amino acid sequence used in step a) is preferably such that (i) it can bind to and/or has affinity for the gp130 binding site on IL-6R and/or the IL-6/IL-6R complex and/or (ii) it competes with gp130 for binding to the IL-6/IL-6R complex; and in step b), the set, collection or library of nucleic acid sequences is screened for nucleic acid sequences that encode (i) an amino acid sequence that can bind to and/or has affinity for another antigenic determinant, part, domain or epitope on IL-6R different from the first antigenic determinant, part, domain or epitope on IL-6R.

[0717] Alternatively, the first amino acid sequence used in step a) is preferably such that (i) it can bind to and/or has affinity for any antigenic determinant, part, domain or epitope on IL-6R; and in step b), the set, collection or library of nucleic acid sequences is screened for nucleic acid sequences that encode (i) an amino acid sequence that can bind to and/or has affinity for the gp130 binding site on IL-6R and/or the IL-6/IL-6R and/or (ii) an amino acid sequence that can compete with gp130 for binding to the IL-6/IL-6R complex.

[0718] In another preferred aspect of the above method, the first amino acid sequence used in step a) is preferably such that (i) it can bind to and/or has affinity for the Tocilizumab (MRA) binding site on IL-6R (and may in particular be directed against one or more of the 18 contact residues as described in Boulanger et al. 2003 (Science 300, 2101-2104) present in the extracellular D3 domain of the IL-6R, more preferably amino acid residues Phe229 and Phe279 present in the extracellular D3 domain of the IL-6R) and/or (ii) it competes with Tocilizumab (MRA) for binding to IL-6R; and in step b), the set, collection or library of nucleic acid sequences is screened for nucleic acid sequences that encode (i) an amino acid sequence that can bind to and/or has affinity for another antigenic determinant, part, domain or epitope on IL-6R different from the first antigenic determinant, part, domain or epitope on IL-6R.

[0719] Alternatively, the first amino acid sequence used in step a) is preferably such that (i) it can bind to and/or has affinity for any antigenic determinant, part, domain or epitope on IL-6R; and in step b), the set, collection or library of nucleic acid sequences is screened for nucleic acid sequences that encode (i) an amino acid sequence that can bind to and/or has affinity for the Tocilizumab (MRA) binding site on IL-6R (and may in particular be directed against one or more of the 18 contact residues as described in Boulanger et al. 2003 (Science 300, 2101-2104) present in the extracellular D3 domain of the IL-6R, more preferably amino acid residues Phe229 and Phe279 present in the extracellular D3 domain of the IL-6R) and/or (ii) an amino acid sequence that can compete with Tocilizumab (MRA) for binding to IL-6R.

[0720] In another preferred aspect of the above method, the first amino acid sequence used in step a) is preferably such that (i) it can bind to and/or has affinity for the M182 binding site on IL-6R and/or (ii) it competes with M182 for binding to IL-6R; and in step b), the set, collection or library of nucleic acid sequences is screened for nucleic acid sequences that encode (i) an amino acid sequence that can bind to and/or has affinity for another antigenic determinant, part, domain or epitope on IL-6R different from the first antigenic determinant, part, domain or epitope on IL-6R.

[0721] Alternatively, the first amino acid sequence used in step a) is preferably such that (i) it can bind to and/or has affinity for any antigenic determinant, part, domain or epitope on IL-6R; and in step b), the set, collection or library of nucleic acid sequences is screened for nucleic acid sequences that encode (i) an amino acid sequence that can bind to and/or has affinity for the M182 binding site on IL-6R and/or (ii) an amino acid sequence that can compete with M182 for binding to IL-6R.

[0722] In another preferred aspect of the above method, the first amino acid sequence used in step a) is preferably such that (i) it can bind to and/or has affinity for the BN-12 binding site on IL-6R and/or (ii) it competes with BN-12 for binding to IL-6R; and in step b), the set, collection or library of nucleic acid sequences is screened for nucleic acid sequences that encode (i) an amino acid sequence that can bind to and/or has affinity for another antigenic determinant, part, domain or epitope on IL-6R different from the first antigenic determinant, part, domain or epitope on IL-6R.

[0723] Alternatively, the first amino acid sequence used in step a) is preferably such that (i) it can bind to and/or has affinity for any antigenic determinant, part, domain or epitope on IL-6R; and in step b), the set, collection or library of nucleic acid sequences is screened for nucleic acid sequences that encode (i) an amino acid sequence that can bind to and/or has affinity for the BN-12 binding site on IL-6R and/or (ii) an amino acid sequence that can compete with BN-12 for binding to IL-6R.

[0724] In another preferred aspect of the above method, the first amino acid sequence used in step a) is preferably such that (i) it can bind to and/or has affinity for the IL-6 binding site on IL-6R (and may in particular be directed against one or more of the 18 contact residues as described in Boulanger et al. 2003 (Science 300, 2101-2104) present in the extracellular D3 domain of the IL-6R, more preferably amino acid residues Phe229 and Phe279 present in the extracellular D3 domain of the IL-6R) and/or (ii) competes with IL-6 for binding to IL-6R; and in step b), the set, collection or library of nucleic acid sequences is screened for nucleic acid sequences that encode (i) an amino acid sequence that can bind to and/or has affinity for the gp130 binding site on IL-6R and/or the IL-6/IL-6R complex and/or (ii) an amino acid sequence that can compete with gp130 for binding to the IL-6/IL-6R complex.

[0725] Alternatively, the first amino acid sequence used in step a) is preferably such that (i) it can bind to and/or has affinity for the gp130 binding site on IL-6R and/or the IL-6/IL-6R complex and/or (ii) competes with gp130 for binding to the IL-6/IL-6R complex; and in step b), the set, collection or library of nucleic acid sequences is screened for nucleic acid sequences that encode (i) an amino acid sequence that can bind to and/or has affinity for the IL-6 binding site on IL-6R (and may in particular be directed against one or more of the 18 contact residues as described in Boulanger et al. 2003 (Science 300, 2101-2104) present in the extracellular D3 domain of the IL-6R, more preferably amino acid residues Phe229 and Phe279 present in the extracellular D3 domain of the IL-6R) and/or (ii) an amino acid sequence that can compete with IL-6 for binding to IL-6R.

[0726] In another preferred aspect of the above method, the first amino acid sequence used in step a) is preferably such that (1) it can bind to and/or has affinity for the IL-6 binding site on IL-6R (and may in particular be directed against one or more of the 18 contact residues as described in Boulanger et al. 2003 (Science 300, 2101-2104) present in the extracellular D3 domain of the IL-6R, more preferably amino acid residues Phe229 and Phe279 present in the extracellular D3 domain of the IL-6R) and/or (ii) competes with IL-6 for binding to IL-6R; and in step b), the set, collection or library of nucleic acid sequences is screened for nucleic acid sequences that encode (i) an amino acid sequence that can bind to and/or has affinity for the M182 binding site on IL-6R and/or (ii) an amino acid sequence that can compete with M182 for binding to IL-6R.

[0727] Alternatively, the first amino acid sequence used in step a) is preferably such that (1) it can bind to and/or has affinity for the M182 binding site on IL-6R and/or (ii) competes with M182 for binding to IL-6R; and in step b), the set, collection or library of nucleic acid sequences is screened for nucleic acid sequences that encode (1) an amino acid sequence that can bind to and/or has affinity for the IL-6 binding site on IL-6R (and may in particular be directed against one or more of the 18 contact residues as described in Boulanger et al. 2003 (Science 300, 2101-2104) present in the extracellular D3 domain of the IL-6R, more preferably amino acid residues Phe229 and Phe279 present in the extracellular D3 domain of the IL-6R) and/or (ii) an amino acid sequence that can compete with IL-6 for binding to IL-6R.

[0728] In another preferred aspect of the above method, the first amino acid sequence used in step a) is preferably such that (i) it can bind to and/or has affinity for the IL-6 binding site on IL-6R (and may in particular be directed against one or more of the 18 contact residues as described in Boulanger et al. 2003 (Science 300, 2101-2104) present in the extracellular D3 domain of the IL-6R, more preferably amino acid residues Phe229 and Phe279 present in the extracellular D3 domain of the IL-6R) and/or (ii) competes with IL-6 for binding to IL-6R; and in step b), the set, collection or library of nucleic acid sequences is screened for nucleic acid sequences that encode (i) an amino acid sequence that can bind to and/or has affinity for the BN-12 binding site on IL-6R and/or (ii) an amino acid sequence that can compete with BN-12 for binding to IL-6R.

[0729] Alternatively, the first amino acid sequence used in step a) is preferably such that (i) it can bind to and/or has affinity for the BN-12 binding site on IL-6R and/or (ii) competes with BN-12 for binding to IL-6R; and in step b), the set, collection or library of nucleic acid sequences is screened for nucleic acid sequences that encode (i) an amino acid sequence that can bind to and/or has affinity for the IL-6 binding site on IL-6R (and may in particular be directed against one or more of the 18 contact residues as described in Boulanger et al. 2003 (Science 300, 2101-2104) present in the extracellular D3 domain of the IL-6R, more preferably amino acid residues Phe229 and Phe279 present in the extracellular D3 domain of the IL-6R) and/or (ii) an amino acid sequence that can compete with IL-6 for binding to IL-6R.

[0730] In a preferred aspect of the above method, the first amino acid sequence used in step a) is preferably such that (i) it can bind to and/or has affinity for the Tocilizumab (MRA) binding site on IL-6R (and may in particular be directed against one or more of the 18 contact residues as described in Boulanger et al. 2003 (Science 300, 2101-2104) present in the extracellular D3 domain of the IL-6R, more preferably amino acid residues Phe229 and Phe279 present in the extracellular D3 domain of the IL-6R) and/or (ii) competes with Tocilizumab (MRA) for binding to IL-6R; and in step b), the set, collection or library of nucleic acid sequences is screened for nucleic acid sequences that encode (i) an amino acid sequence that can bind to and/or has affinity for the gp130 binding site on IL-6R and/or the IL-6/IL-6R complex and/or (ii) an amino acid sequence that can compete with gp130 for binding to the IL-6/IL-6R complex.

[0731] Alternatively, the first amino acid sequence used in step a) is preferably such that (i) it can bind to and/or has affinity for the gp130 binding site on IL-6R and/or the IL-6/IL-6R complex and/or (ii) competes with gp130 for binding to the IL-6/IL-6R complex; and in step b), the set, collection or library of nucleic acid sequences is screened for nucleic acid sequences that encode (i) an amino acid sequence that can bind to and/or has affinity for the Tocilizumab (MRA) binding site on IL-6R (and may in particular be directed against one or more of the 18 contact residues as described in Boulanger et al. 2003 (Science 300, 2101-2104) present in the extracellular D3 domain of the IL-6R, more preferably amino acid residues Phe229 and Phe279 present in the extracellular D3 domain of the IL-6R) and/or (ii) an amino acid sequence that can compete with Tocilizumab (MRA) for binding to IL-6R.

[0732] In a preferred aspect of the above method, the first amino acid sequence used in step a) is preferably such that (i) it can bind to and/or has affinity for the Tocilizumab (MRA) binding site on IL-6R (and may in particular be directed against one or more of the 18 contact residues as described in Boulanger et al. 2003 (Science 300, 2101-2104) present in the extracellular D3 domain of the IL-6R, more preferably amino acid residues Phe229 and Phe279 present in the extracellular D3 domain of the IL-6R) and/or (ii) competes with Tocilizumab (MRA) for binding to IL-6R; and in step b), the set, collection or library of nucleic acid sequences is screened for nucleic acid sequences that encode (i) an amino acid sequence that can bind to and/or has affinity for the M182 binding site on IL-6R and/or (ii) an amino acid sequence that can compete with M182 for binding to IL-6R.

[0733] Alternatively, the first amino acid sequence used in step a) is preferably such that (i) it can bind to and/or has affinity for the M182 binding site on IL-6R and/or (ii) competes with M182 for binding to IL-6R; and in step b), the set, collection or library of nucleic acid sequences is screened for nucleic acid sequences that encode (i) an amino acid sequence that can bind to and/or has affinity for the Tocilizumab (MRA) binding site on IL-6R (and may in particular be directed against one or more of the 18 contact residues as described in Boulanger et al. 2003 (Science 300, 2101-2104) present in the extracellular D3 domain of the IL-6R, more preferably amino acid residues Phe229 and Phe279 present in the extracellular D3 domain of the IL-6R) and/or (ii) an amino acid sequence that can compete with Tocilizumab (MRA) for binding to IL-6R.

[0734] In a preferred aspect of the above method, the first amino acid sequence used in step a) is preferably such that (i) it can bind to and/or has affinity for the Tocilizumab (MRA) binding site on IL-6R (and may in particular be directed against one or more of the 18 contact residues as described in Boulanger et al. 2003 (Science 300, 2101-2104) present in the extracellular D3 domain of the IL-6R, more preferably amino acid residues Phe229 and Phe279 present in the extracellular D3 domain of the IL-6R) and/or (ii) competes with Tocilizumab (MRA) for binding to IL-6R; and in step b), the set, collection or library of nucleic acid sequences is screened for nucleic acid sequences that encode (i) an amino acid sequence that can bind to and/or has affinity for the BN-12 binding site on IL-6R and/or (ii) an amino acid sequence that can compete with BN-12 for binding to IL-6R.

[0735] Alternatively, the first amino acid sequence used in step a) is preferably such that (i) it can bind to and/or has affinity for the BN-12 binding site on IL-6R and/or (ii) competes with BN-12 for binding to IL-6R; and in step b), the set, collection or library of nucleic acid sequences is screened for nucleic acid sequences that encode (i) an amino acid sequence that can bind to and/or has affinity for the Tocilizumab (MRA) binding site on IL-6R (and may in particular be directed against one or more of the 18 contact residues as described in Boulanger et al. 2003 (Science 300, 2101-2104) present in the extracellular D3 domain of the IL-6R, more preferably amino acid residues Phe229 and Phe279 present in the extracellular D3 domain of the IL-6R) and/or (ii) an amino acid sequence that can compete with Tocilizumab (MRA) for binding to IL-6R.

[0736] In a preferred aspect of the above method, the first amino acid sequence used in step a) is preferably such that (i) it can bind to and/or has affinity for the BN-12 binding site on IL-6R and/or (ii) competes with BN-12 for binding to IL-6R; and in step b), the set, collection or library of nucleic acid sequences is screened for nucleic acid sequences that encode (i) an amino acid sequence that can bind to and/or has affinity for the gp130 binding site on IL-6R and/or the IL-6/IL-6R complex and/or (ii) an amino acid sequence that can compete with gp130 for binding to the IL-6/IL-6R complex.

[0737] Alternatively, the first amino acid sequence used in step a) is preferably such that (i) it can bind to and/or has affinity for the gp130 binding site on IL-6R and/or the IL-6/IL-6R complex and/or (ii) competes with gp130 for binding to the IL-6/IL-6R complex; and in step b), the set, collection or library of nucleic acid sequences is screened for nucleic acid sequences that encode (i) an amino acid sequence that can bind to and/or has affinity for the BN-12 binding site on IL-6R and/or (ii) an amino acid sequence that can compete with BN-12 for binding to IL-6R.

[0738] In a preferred aspect of the above method, the first amino acid sequence used in step a) is preferably such that (i) it can bind to and/or has affinity for the BN-12 binding site on IL-6R and/or (ii) competes with BN-12 for binding to IL-6R; and in step b), the set, collection or library of nucleic acid sequences is screened for nucleic acid sequences that encode (i) an amino acid sequence that can bind to and/or has affinity for the M182 binding site on IL-6R and/or (ii) an amino acid sequence that can compete with M182 for binding to IL-6R.

[0739] Alternatively, the first amino acid sequence used in step a) is preferably such that (i) it can bind to and/or has affinity for the M182 binding site on IL-6R and/or (ii) competes with M182 for binding to IL-6R; and in step b), the set, collection or library of nucleic acid sequences is screened for nucleic acid sequences that encode (i) an amino acid sequence that can bind to and/or has affinity for the BN-12 binding site on IL-6R and/or (ii) an amino acid sequence that can compete with BN-12 for binding to IL-6R.

[0740] In the above methods, screening or selecting for (nucleic acid sequences that encode) amino acid sequences that compete with IL-6. gp130, Tocilizumab (MRA), BN-12 or M182, respectively, may be performed using generally known methods for screening or selecting for competitors of known binding molecules, which may for example involve performing the screening or selection in the presence of the binding molecule and/or determining the binding affinity of the compound(s) to be screened in the presence of the binding molecule.

[0741] It is also possible, in step b), to screen for nucleic acid sequences that both (i) encode an amino acid sequence that can bind to and/or has affinity for the IL-6 binding site on IL-6R (and in particular one or more of the 18 contact residues as described in Boulanger et al. 2003 (Science 300, 2101-2104) present in the extracellular D3 domain of the IL-6R, more preferably amino acid residues Phe229 and Phe279 present in the extracellular D3 domain of the IL-6R) and/or that can compete with IL-6 for binding to IL-6R; and that also (ii) encode an amino acid sequence that can bind to and/or has affinity for the gp130 binding site on IL-6R and/or the IL-6/IL-6R complex and/or that can compete with gp130 for binding to the IL-6/IL-6R complex. Again, this may be performed in separate steps or a single step, and by selecting or screening in the presence of IL-6 and/or gp130, as applicable.

[0742] It is also possible, in step b), to screen for nucleic acid sequences that both (i) encode an amino acid sequence that can bind to and/or has affinity for the IL-6 binding site on IL-6R (and in particular one or more of the 18 contact residues as described in Boulanger et al. 2003 (Science 300, 2101-2104) present in the extracellular D3 domain of the IL-6R, more preferably amino acid residues Phe229 and Phe279 present in the extracellular D3 domain of the IL-6R) and/or that can compete with IL-6 for binding to IL-6R; and that also (ii) encode an amino acid sequence that can bind to and/or has affinity for the M182 binding site on IL-6R and/or that can compete with M182 for binding to IL-6R. Again, this may be performed in separate steps or a single step, and by selecting or screening in the presence of IL-6 and/or M182, as applicable.

[0743] It is also possible, in step b), to screen for nucleic acid sequences that both (i) encode an amino acid sequence that can bind to and/or has affinity for the IL-6 binding site on IL-6R (and in particular one or more of the 18 contact residues as described in Boulanger et al. 2003 (Science 300, 2101-2104) present in the extracellular D3 domain of the IL-6R, more preferably amino acid residues Phe229 and Phe279 present in the extracellular D3 domain of the IL-6R) and/or that can compete with IL-6 for binding to IL-6R; and that also (ii) encode an amino acid sequence that can bind to and/or has affinity for the BN-12 binding site on IL-6R and/or that can compete with BN-12 for binding to IL-6R. Again, this may be performed in separate steps or a single step, and by selecting or screening in the presence of IL-6 and/or BN-12, as applicable.

[0744] It is also possible, in step b), to screen for nucleic acid sequences that both (i) encode an amino acid sequence that can bind to and/or has affinity for the Tocilizumab (MRA) binding site on IL-6R (and in particular one or more of the 18 contact residues as described in Boulanger et al. 2003 (Science 300, 2101-2104) present in the extracellular D3 domain of the IL-6R, more preferably amino acid residues Phe229 and Phe279 present in the extracellular D3 domain of the IL-6R) and/or that can compete with Tocilizumab (MRA) for binding to IL-6R; and that also (ii) encode an amino acid sequence that can bind to and/or has affinity for the gp130 binding site on IL-6R and/or the IL-6/IL-6R complex and/or that can compete with gp130 for binding to the IL-6/IL-6R complex. Again, this may be performed in separate steps or a single step, and by selecting or screening in the presence of Tocilizumab (MRA) and/or gp130, as applicable.

[0745] It is also possible, in step b), to screen for nucleic acid sequences that both (i) encode an amino acid sequence that can bind to and/or has affinity for the Tocilizumab (MRA) binding site on IL-6R (and in particular one or more of the 18 contact residues as described in Boulanger et al. 2003 (Science 300, 2101-2104) present in the extracellular D3 domain of the IL-6R, more preferably amino acid residues Phe229 and Phe279 present in the extracellular D3 domain of the IL-6R) and/or that can compete with Tocilizumab (MRA) for binding to IL-6R; and that also (ii) encode an amino acid sequence that can bind to and/or has affinity for the M182 binding site on IL-6R and/or that can compete with M182 for binding to IL-6R. Again, this may be performed in separate steps or a single step, and by selecting or screening in the presence of Tocilizumab (MRA) and/or M182, as applicable.

[0746] It is also possible, in step b), to screen for nucleic acid sequences that both (i) encode an amino acid sequence that can bind to and/or has affinity for the Tocilizumab (MRA) binding site on IL-6R (and in particular one or more of the 18 contact residues as described in Boulanger et al. 2003 (Science 300, 2101-2104) present in the extracellular D3 domain of the IL-6R, more preferably amino acid residues Phe229 and Phe279 present in the extracellular D3 domain of the IL-6R) and/or that can compete with Tocilizumab (MRA) for binding to IL-6R; and that also (ii) encode an amino acid sequence that can bind to and/or has affinity for the BN-12 binding site on IL-6R and/or that can compete with BN-12 for binding to IL-6R. Again, this may be performed in separate steps or a single step, and by selecting or screening in the presence of Tocilizumab (MRA) and/or BN-12, as applicable.

[0747] It is also possible, in step b), to screen for nucleic acid sequences that both (i) encode an amino acid sequence that can bind to and/or has affinity for the BN-12 binding site on IL-6R and/or that can compete with BN-12 for binding to IL-6R; and that also (ii) encode an amino acid sequence that can bind to and/or has affinity for the gp130 binding site on IL-6R and/or the IL-6/IL-6R complex and/or that can compete with gp130 for binding to the IL-6/IL-6R complex. Again, this may be performed in separate steps or a single step, and by selecting or screening in the presence of BN-12 and/or gp130, as applicable.

[0748] It is also possible, in step b), to screen for nucleic acid sequences that both (i) encode an amino acid sequence that can bind to and/or has affinity for the BN-12 binding site on IL-6R and/or that can compete with BN-12 for binding to IL-6R; and that also (ii) encode an amino acid sequence that can bind to and/or has affinity for the M182 binding site on IL-6R and/or that can compete with M182 for binding to IL-6R. Again, this may be performed in separate steps or a single step, and by selecting or screening in the presence of BN-12 and/or M182, as applicable.

[0749] It will also be clear to the skilled person that the above methods may be performed by screening a set, collection or library of amino acid sequences that correspond to (e.g. are encoded by) the nucleic acid sequences used in the above method; and such methods form further aspects of the invention.

[0750] The invention in a further aspect provides a method for preparing and generating biparatopic polypeptides of the invention which comprises at least the steps of:
[0751] a) providing a set, collection or library of nucleic acid sequences, in which each nucleic acid sequence in said set, collection or library encodes a fusion protein that comprises a first amino acid sequence that can bind to and/or has affinity for a first antigenic determinant, part, domain or epitope on IL-6R that is fused via a linker sequence to a second amino acid sequence that can bind to and/or has affinity for a second antigenic determinant, part, domain or epitope on IL-6R (which may be the same or different as the first antigenic determinant, part, domain or epitope on IL-6R), in which essentially each nucleic acid sequence (or most of these) encodes a fusion protein with a different linker sequence so as to provide a set, collection or library of nucleic acid sequences encoding different fusion proteins;
[0752] b) screening said set, collection or library of nucleic acid sequences for nucleic acid sequences that encode an amino acid sequence that can bind to and/or has affinity for the first and second antigenic determinant, part, domain or epitope on IL-6R;

[0753] and
[0754] c) isolating the nucleic acid sequences that encode an amino acid sequence that can bind to and/or has affinity for the first and second antigenic determinant, part, domain or epitope on IL-6R, optionally followed by expressing the encoded amino acid sequence.

[0755] As will be clear to the skilled person, this method can be used to screen for suitable or even optimal linker lengths for linking the first and second amino acid sequence. For example, in this aspect, the first amino acid sequence may be an amino acid sequence that can bind to and/or has affinity for the IL-6 binding site on IL-6R (and in particular one or more of the 18 contact residues as described in Boulanger et al. 2003 (Science 300, 2101-2104) present in the extracellular D3 domain of the IL-6R, more preferably amino acid residues Phe229 and Phe279 present in the extracellular D3 domain of the IL-6R) and/or that can compete with IL-6 for binding to IL-6R; and the second amino acid sequence may be an amino acid sequence that can bind to and/or has affinity for another antigenic determinant, part, domain or epitope on IL-6R (or visa versa). The first amino acid sequence may be an amino acid sequence that can bind to and/or has affinity for the gp130 binding site on IL-6R and/or the IL-6/IL-6R complex and/or that can compete with gp130 for binding to the IL-6/IL-6R complex; and the second amino acid sequence may be an amino acid sequence that can bind to and/or has affinity for another antigenic determinant, part, domain or epitope on IL-6R (or visa versa). The first amino acid sequence may be an amino acid sequence that can bind to and/or has affinity for the Tocilizumab (MRA) binding site on IL-6R (and in particular one or more of the 18 contact residues as described in Boulanger et al. 2003 (Science 300, 2101-2104) present in the extracellular D3 domain of the IL-6R, more preferably amino acid residues Phe229 and Phe279 present in the extracellular D3 domain of the IL-6R) and/or that can compete with Tocilizumab (MRA) for binding to IL-6R; and the second amino acid sequence may be an amino acid sequence that can bind to and/or has affinity for another antigenic determinant, part, domain or epitope on IL-6R (or visa versa). The first amino acid sequence may be an amino acid sequence that can bind to and/or has affinity for the M182 binding site on IL-6R and/or that can compete with M182 for binding to IL-6R; and the second amino acid sequence may be an amino acid sequence that can bind to and/or has affinity for another antigenic determinant, part, domain or epitope on IL-6R (or visa versa). The first amino acid sequence may be an amino acid sequence that can bind to and/or has affinity for the BN-12 binding site on IL-6R and/or that can compete with Bn-12 for binding to IL-6R; and the second amino acid sequence may be an amino acid sequence that can bind to and/or has affinity for another antigenic determinant, part, domain or epitope on IL-6R (or visa versa). The screening and selection step b) may be performed as further described above.

[0756] For example, in this aspect, the first amino acid sequence may be an amino acid sequence that can bind to and/or has affinity for the IL-6 binding site on IL-6R (and in particular one or more of the 18 contact residues as described in Boulanger et al. 2003 (Science 300, 2101-2104) present in the extracellular D3 domain of the IL-6R, more preferably amino acid residues Phe229 and Phe279 present in the extracellular D3 domain of the IL-6R) and/or that can compete with IL-6 for binding to IL-6R; and the second amino acid sequence may be an amino acid sequence that can bind to and/or has affinity for the gp130 binding site on IL-6R and/or the IL-6/IL-6R complex and/or that can compete with gp130 for binding to the IL-6/IL-6R complex (or visa versa). The screening and selection step b) may be performed as further described above.

[0757] In this aspect, the first amino acid sequence may be an amino acid sequence that can bind to and/or has affinity for the IL-6 binding site on IL-6R (and in particular one or more of the 18 contact residues as described in Boulanger et al. 2003 (Science 300, 2101-2104) present in the extracellular

[0758] D3 domain of the IL-6R, more preferably amino acid residues Phe229 and Phe279 present in the extracellular D3 domain of the IL-6R) and/or that can compete with IL-6 for binding to IL-6R; and the second amino acid sequence may be an amino acid sequence that can bind to and/or has affinity for the M182 binding site on IL-6R and/or that can compete with M182 for binding to the IL-6/IL-6R complex (or visa versa). The screening and selection step b) may be performed as further described above.

[0759] In this aspect, the first amino acid sequence may be an amino acid sequence that can bind to and/or has affinity for the IL-6 binding site on IL-6R (and in particular one or more of the 18 contact residues as described in Boulanger et al. 2003 (Science 300, 2101-2104) present in the extracellular D3 domain of the IL-6R, more preferably amino acid residues Phe229 and Phe279 present in the extracellular D3 domain of the IL-6R) and/or that can compete with IL-6 for binding to IL-6R; and the second amino acid sequence may be an amino acid sequence that can bind to and/or has affinity for the BN-12 binding site on IL-6R and/or that can compete with BN-12 for binding to the IL-6/IL-6R complex (or visa versa). The screening and selection step b) may be performed as further described above.

[0760] In this aspect, the first amino acid sequence may be an amino acid sequence that can bind to and/or has affinity for the Tocilizumab (MRA) binding site on IL-6R (and in particular one or more of the 18 contact residues as described in Boulanger et al. 2003 (Science 300, 2101-2104) present in the extracellular D3 domain of the IL-6R, more preferably amino acid residues Phe229 and Phe279 present in the extracellular D3 domain of the IL-6R) and/or that can compete with Tocilizumab (MRA) for binding to IL-6R; and the second amino acid sequence may be an amino acid sequence that can bind to and/or has affinity for the gp130 binding site on IL-6R and/or the IL-6/IL-6R complex and/or that can compete with gp130 for binding to the IL-6/IL-6R complex (or visa versa). The screening and selection step b) may be performed as further described above.

[0761] In this aspect, the first amino acid sequence may be an amino acid sequence that can bind to and/or has affinity for the Tocilizumab (MRA) binding site on IL-6R (and in particular one or more of the 18 contact residues as described in Boulanger et al. 2003 (Science 300, 2101-2104) present in the extracellular D3 domain of the IL-6R, more preferably amino acid residues Phe229 and Phe279 present in the extracellular D3 domain of the IL-6R) and/or that can compete with Tocilizumab (MRA) for binding to IL-6R; and the second amino acid sequence may be an amino acid sequence that can bind to and/or has affinity for the M182 binding site on IL-6R and/or that can compete with M182 for binding to the IL-6/IL-6R complex (or visa versa). The screening and selection step b) may be performed as further described above.

[0762] In this aspect, the first amino acid sequence may be an amino acid sequence that can bind to and/or has affinity for the Tocilizumab (MRA) binding site on IL-6R (and in particular one or more of the 18 contact residues as described in Boulanger et al. 2003 (Science 300, 2101-2104) present in the extracellular D3 domain of the IL-6R, more preferably amino acid residues Phe229 and Phe279 present in the extracellular D3 domain of the IL-6R) and/or that can compete with Tocilizumab (MRA) for binding to IL-6R; and the second amino acid sequence may be an amino acid sequence that can bind to and/or has affinity for the BN-12 binding site on IL-6R and/or that can compete with BN-12 for binding to the IL-6/IL-6R complex (or visa versa). The screening and selection step b) may be performed as further described above.

[0763] In this aspect, the first amino acid sequence may be an amino acid sequence that can bind to and/or has affinity for the BN-12 binding site on IL-6R and/or that can compete with BN-12 for binding to IL-6R; and the second amino acid sequence may be an amino acid sequence that can bind to and/or has affinity for the gp130 binding site on IL-6R and/or the IL-6/IL-6R complex and/or that can compete with gp130 for binding to the IL-6/IL-6R complex (or visa versa). The screening and selection step b) may be performed as further described above.

[0764] In this aspect, the first amino acid sequence may be an amino acid sequence that can bind to and/or has affinity for the BN-12 binding site on IL-6R and/or that can compete with BN-12 for binding to IL-6R; and the second amino acid sequence may be an amino acid sequence that can bind to and/or has affinity for the M182 binding site on IL-6R and/or that can compete with M182 for binding to the IL-6/IL-6R complex (or visa versa). The screening and selection step b) may be performed as further described above.

[0765] Another method for preparing and generating biparatopic polypeptides of the invention may comprise at least the steps of:
[0766] a) providing a set, collection or library of nucleic acid sequences encoding amino acid sequences;
[0767] b) screening said set, collection or library of nucleic acid sequences for a set, collection or library of nucleic acid sequences that encode an amino acid sequence that can bind to and/or has affinity for IL-6R;
[0768] c) ligating said set, collection or library of nucleic acid sequences that encode an amino acid sequence that can bind to and/or has affinity for IL-6R to another nucleic acid sequence that encodes an amino acid sequence that can bind to and/or has affinity for IL-6R (e.g. a nucleic acid sequence that encodes an amino acid sequence that competes with IL-6 for binding IL-6R);
   and
[0769] d) from the set, collection or library of nucleic acid sequences obtained in c), isolating the nucleic acid sequences encoding a biparatopic amino acid sequence that can bind to and/or has affinity for IL-6R (and e.g. further selecting for nucleic acid sequences that encode a biparatopic amino acid sequence that antagonizes with higher potency compared to the monovalent amino acid sequences), followed by expressing the encoded amino acid sequence.

[0770] The nucleic acid sequence encoding the biparatopic polypeptide obtained in the method above can subsequently be fused to one or more further sets, collections or libraries of nucleic acid sequences encoding amino acid sequences that can bind to and/or have affinity for IL-6R in order to obtain a triparatopic or multiparatopic amino acid sequence respectively.

[0771] In such a method, the set, collection or library of nucleic acid sequences encoding amino acid sequences may for example be a set, collection or library of nucleic acid sequences encoding a naïve set, collection or library of immunoglobulin sequences; a set, collection or library of nucleic acid sequences encoding a synthetic or semi-synthetic set, collection or library of immunoglobulin sequences; and/or a set, collection or library of nucleic acid sequences encoding a set, collection or library of immunoglobulin sequences that have been subjected to affinity maturation.

[0772] The set, collection or library of nucleic acid sequences that encode an amino acid sequence that can bind to and/or has affinity for IL-6R can be obtained by any selection or screening method known in the art for the selection and/or screening of nucleic acid sequences that encode an amino acid sequence that can bind to and/or has affinity for IL-6R and as, for example, described in the Examples section.

[0773] Also, in such a method, the set, collection or library of nucleic acid sequences may encode a set, collection or library of heavy chain variable domains (such as V_{H} domains or V_{HH} domains) or of light chain variable domains. For example, the set, collection or library of nucleic acid sequences may encode a set, collection or library of domain antibodies or single domain antibodies, or a set, collection or library of amino acid sequences that are capable of functioning as a domain antibody or single domain antibody.

[0774] In a preferred aspect of this method, the set, collection or library of nucleic acid sequences may be an immune set, collection or library of nucleic acid sequences, for example derived from a mammal that has been suitably immunized with IL-6R or with a suitable antigenic determinant based thereon or derived therefrom, such as an antigenic part, fragment, region, domain, loop or other epitope thereof. In one particular aspect, said antigenic determinant may be an extracellular part, region, domain, loop or other extracellular epitope(s).

[0775] The set, collection or library of nucleic acid sequences may for example encode an immune set, collection or library of heavy chain variable domains or of light chain variable domains. In one specific aspect, the set, collection or library of nucleotide sequences may encode a set, collection or library of V_{HH} sequences.

[0776] In the above methods, the nucleic acid sequence may be displayed on a phage, phagemid, ribosome or suitable micro-organism (such as yeast), such as to facilitate screening. Suitable methods, techniques and host organisms for displaying and screening (a set, collection or library of) nucleotide sequences encoding amino acid sequences will be clear to the person skilled in the art, for example on the basis of the further disclosure herein. Reference is also made to the review by Hoogenboom in Nature Biotechnology, 23, 9, 1105-1116 (2005).

[0777] Another method for preparing and generating biparatopic polypeptides of the invention may comprise at least the steps of:
[0778] a) providing a first set, collection or library of nucleic acid sequences encoding amino acid sequences;
[0779] b) screening said first set, collection or library of nucleic acid sequences for a nucleic acid sequence that encodes an amino acid sequence that can bind to and/or has affinity for a first antigenic determinant, part, domain or epitope on IL-6R;
[0780] c) ligating the nucleic acid sequence encoding said amino acid sequence that can bind to and/or has affinity for a first antigenic determinant, part, domain or epitope on IL-6R obtained in b) to another set, collection or library of nucleic acid sequences encoding amino acid sequences to obtain a set, collection or library of nucleic acid sequences that encode fusion proteins;
[0781] d) screening said set, collection or library of nucleic acid sequences obtained in step c) for a nucleic acid sequence that encodes an amino acid sequence that can bind a second antigenic determinant, part, domain or epitope on IL-6R different from the first antigenic determinant, part, domain or epitope on IL-6R;
   and
[0782] e) isolating the nucleic acid sequence that encodes an amino acid sequence that can bind to and/or has affinity for the first and second antigenic determinant, part, domain or epitope on IL-6R, optionally followed by expressing the encoded amino acid sequence.

[0783] In a preferred aspect of the above method, the first amino acid sequence obtained in step b) is preferably such that (i) it can bind to and/or has affinity for the IL-6 binding site on IL-6R (and in particular one or more of the 18 contact residues as described in Boulanger et al. 2003 (Science 300, 2101-2104) present in the extracellular D3 domain of the IL-6R, more preferably amino acid residues Phe229 and Phe279 present in the extracellular D3 domain of the IL-6R) and/or (ii) competes with IL-6 for binding to IL-6R; and in step d), the set, collection or library of nucleic acid sequences is screened for nucleic acid sequences that encode an amino acid sequence that can bind to and/or has affinity for a second antigenic determinant, part, domain or epitope on IL-6R different from the first antigenic determinant, part, domain or epitope on IL-6R.

[0784] Alternatively, the first amino acid sequence obtained in step b) is preferably such that it can bind to and/or has affinity for a first antigenic determinant, part, domain or epitope on IL-6R; and in step d), the set, collection or library of nucleic acid sequences is screened for nucleic acid sequences that encode (i) an amino acid sequence that can bind to and/or has affinity for the IL-6 binding site on IL-6R (and in particular one or more of the 18 contact residues as described in Boulanger et al. 2003 (Science 300, 2101-2104) present in the extracellular D3 domain of the IL-6R, more preferably amino acid residues Phe229 and Phe279 present in the extracellular D3 domain of the IL-6R) and/or (ii) an amino acid sequence that can compete with IL-6 for binding to IL-6R.

[0785] In another preferred aspect of the above method, the first amino acid sequence obtained in step b) is preferably such that (i) it can bind to and/or has affinity for the gp130 binding site on IL-6R and/or the IL-6/IL-6R complex; and in step d), the set, collection or library of nucleic acid sequences is screened for nucleic acid sequences that encode an amino acid sequence that can bind to and/or has affinity for a second antigenic determinant, part, domain or epitope on IL-6R different from the first antigenic determinant, part, domain or epitope on IL-6R.

[0786] Alternatively, the first amino acid sequence obtained in step b) is preferably such that it can bind to and/or has affinity for a first antigenic determinant, part, domain or epitope on IL-6R; and in step d), the set, collection or library of nucleic acid sequences is screened for nucleic acid sequences that encode (i) an amino acid sequence that can bind to and/or has affinity for the gp130 binding site on IL-6R and/or the IL-6/IL-6R complex and/or (ii) an amino acid sequence that can compete with gp130 for binding to the IL-6/IL-6R complex.

[0787] In a preferred aspect of the above method, the first amino acid sequence obtained in step b) is preferably such that (i) it can bind to and/or has affinity for the Tocilizumab (MRA) binding site on IL-6R (and in particular one or more of the 18 contact residues as described in Boulanger et al. 2003 (Science 300, 2101-2104) present in the extracellular D3 domain of the IL-6R, more preferably amino acid residues Phe229 and Phe279 present in the extracellular D3 domain of the IL-6R) and/or (ii) competes with Tocilizumab (MRA) for binding to IL-6R; and in step d), the set, collection or library of nucleic acid sequences is screened for nucleic acid sequences that encode an amino acid sequence that can bind to and/or has affinity for a second antigenic determinant, part, domain or epitope on IL-6R different from the first antigenic determinant, part, domain or epitope on IL-6R.

[0788] Alternatively, the first amino acid sequence obtained in step b) is preferably such that it can bind to and/or has affinity for a first antigenic determinant, part, domain or epitope on IL-6R; and in step d), the set, collection or library of nucleic acid sequences is screened for nucleic acid sequences that encode (i) an amino acid sequence that can bind to and/or has affinity for the Tocilizumab (MRA) binding site on IL-6R (and in particular one or more of the 18 contact residues as described in Boulanger et al. 2003 (Science 300, 2101-2104) present in the extracellular D3 domain of the IL-6R, more preferably amino acid residues Phe229 and Phe279 present in the extracellular D3 domain of the IL-6R) and/or (ii) an amino acid sequence that can compete with Tocilizumab (MRA) for binding to IL-6R.

[0789] In a preferred aspect of the above method, the first amino acid sequence obtained in step b) is preferably such that (i) it can bind to and/or has affinity for the M182 binding site on IL-6R (and in particular one or more of the 18 contact residues as described in Boulanger et al. 2003 (Science 300, 2101-2104) present in the extracellular D3 domain of the IL-6R, more preferably amino acid residues Phe229 and Phe279 present in the extracellular D3 domain of the IL-6R) and/or (ii) competes with M182 for binding to IL-6R; and in step d), the set, collection or library of nucleic acid sequences is screened for nucleic acid sequences that encode an amino acid sequence that can bind to and/or has affinity for a second antigenic determinant, part, domain or epitope on IL-6R different from the first antigenic determinant, part, domain or epitope on IL-6R.

[0790] In a preferred aspect of the above method, the first amino acid sequence obtained in step b) is preferably such that (i) it can bind to and/or has affinity for the BN-12 binding site on IL-6R and/or (ii) competes with BN-12 for binding to IL-6R; and in step d), the set, collection or library of nucleic acid sequences is screened for nucleic acid sequences that encode an amino acid sequence that can bind to and/or has affinity for a second antigenic determinant, part, domain or epitope on IL-6R different from the first antigenic determinant, part, domain or epitope on IL-6R.

[0791] Alternatively, the first amino acid sequence obtained in step b) is preferably such that it can bind to and/or has affinity for a first antigenic determinant, part, domain or epitope on IL-6R; and in step d), the set, collection or library of nucleic acid sequences is screened for nucleic acid sequences that encode (i) an amino acid sequence that can bind to and/or has affinity for the BN-12 binding site on IL-6R and/or (ii) an amino acid sequence that can compete with BN-12 for binding to IL-6R.

[0792] In another preferred aspect of the above method, the first amino acid sequence obtained in step b) is preferably such that (i) it can bind to and/or has affinity for the IL-6 binding site on IL-6R (and in particular one or more of the 18 contact residues as described in Boulanger et al. 2003 (Science 300, 2101-2104) present in the extracellular D3 domain of the IL-6R, more preferably amino acid residues Phe229 and Phe279 present in the extracellular D3 domain of the IL-6R) and/or (ii) competes with IL-6 for binding to IL-6R; and in step d), the set, collection or library of nucleic acid sequences is screened for nucleic acid sequences that encode (i) an amino acid sequence that can bind to and/or has affinity for the gp130 binding site on IL-6R or the IL-6/IL-6R complex and/or (ii) an amino acid sequence that can compete with gp130 for binding to the IL-6/IL-6R complex.

[0793] Alternatively, the first amino acid sequence obtained in step b) is preferably such that (i) it can bind to and/or has affinity for the gp130 binding site on IL-6R and/or the IL-6/IL-6R complex and/or (ii) competes with gp130 for binding to the IL-6/IL-6R complex; and in step d), the set, collection or library of nucleic acid sequences is screened for nucleic acid sequences that encode (i) an amino acid sequence that can bind to and/or has affinity for the IL-6 binding site on IL-6R (and in particular one or more of the 18 contact residues as described in Boulanger et al. 2003 (Science 300, 2101-2104) present in the extracellular D3 domain of the IL-6R, more preferably amino acid residues Phe229 and Phe279 present in the extracellular D3 domain of the IL-6R) and/or (ii) an amino acid sequence that can compete with IL-6 for binding to IL-6R.

[0794] In another preferred aspect of the above method, the first amino acid sequence obtained in step b) is preferably such that (i) it can bind to and/or has affinity for the IL-6 binding site on IL-6R (and in particular one or more of the 18 contact residues as described in Boulanger et al. 2003 (Science 300, 2101-2104) present in the extracellular D3 domain of the IL-6R, more preferably amino acid residues Phe229 and Phe279 present in the extracellular D3 domain of the IL-6R) and/or (ii) competes with IL-6 for binding to IL-6R; and in step d), the set, collection or library of nucleic acid sequences is screened for nucleic acid sequences that encode (i) an amino acid sequence that can bind to and/or has affinity for the M182 binding site on IL-6R and/or (ii) an amino acid sequence that can compete with M182 for binding to the IL-6R.

[0795] Alternatively, the first amino acid sequence obtained in step b) is preferably such that (i) it can bind to and/or has affinity for the M182 binding site on IL-6R and/or (ii) competes with M182 for binding to the IL-6R; and in step d), the set, collection or library of nucleic acid sequences is screened for nucleic acid sequences that encode (i) an amino acid sequence that can bind to and/or has affinity for the IL-6 binding site on IL-6R (and in particular one or more of the 18 contact residues as described in Boulanger et al. 2003 (Science 300, 2101-2104) present in the extracellular D3 domain of the IL-6R, more preferably amino acid residues Phe229 and Phe279 present in the extracellular D3 domain of the IL-6R) and/or (ii) an amino acid sequence that can compete with IL-6 for binding to IL-6R.

[0796] In another preferred aspect of the above method, the first amino acid sequence obtained in step b) is preferably such that (i) it can bind to and/or has affinity for the IL-6 binding site on IL-6R (and in particular one or more of the 18 contact residues as described in Boulanger et al. 2003 (Science 300, 2101-2104) present in the extracellular D3 domain of the IL-6R, more preferably amino acid residues Phe229 and Phe279 present in the extracellular D3 domain of the IL-6R) and/or (ii) competes with IL-6 for binding to IL-6R; and in step d), the set, collection or library of nucleic acid sequences is screened for nucleic acid sequences that encode (1) an amino acid sequence that can bind to and/or has affinity for the BN-12 binding site on IL-6R and/or (ii) an amino acid sequence that can compete with BN-12 for binding to the IL-6R.

[0797] Alternatively, the first amino acid sequence obtained in step b) is preferably such that (i) it can bind to and/or has affinity for the Bn-12 binding site on IL-6R and/or (ii) competes with Bn-12 for binding to the IL-6R; and in step d), the set, collection or library of nucleic acid sequences is screened for nucleic acid sequences that encode (i) an amino acid sequence that can bind to and/or has affinity for the IL-6 binding site on IL-6R (and in particular one or more of the 18 contact residues as described in Boulanger et al. 2003 (Science 300, 2101-2104) present in the extracellular D3 domain of the IL-6R, more preferably amino acid residues Phe229 and Phe279 present in the extracellular D3 domain of the IL-6R) and/or (ii) an amino acid sequence that can compete with IL-6 for binding to IL-6R.

[0798] In another preferred aspect of the above method, the first amino acid sequence obtained in step b) is preferably such that (i) it can bind to and/or has affinity for the Tocilizumab (MRA) binding site on IL-6R (and in particular one or more of the 18 contact residues as described in Boulanger et al. 2003 (Science 300, 2101-2104) present in the extracellular D3 domain of the IL-6R, more preferably amino acid residues Phe229 and Phe279 present in the extracellular D3 domain of the IL-6R) and/or (ii) competes with Tocilizumab (MRA) for binding to IL-6R; and in step d), the set, collection or library of nucleic acid sequences is screened for nucleic acid sequences that encode (i) an amino acid sequence that can bind to and/or has affinity for the gp130 binding site on IL-6R or the IL-6/IL-6R complex and/or (ii) an amino acid sequence that can compete with gp130 for binding to the IL-6/IL-6R complex.

[0799] Alternatively, the first amino acid sequence obtained in step b) is preferably such that (i) it can bind to and/or has affinity for the gp130 binding site on IL-6R and/or the IL-6/IL-6R complex and/or (ii) competes with gp130 for binding to the IL-6/IL-6R complex; and in step d), the set, collection or library of nucleic acid sequences is screened for nucleic acid sequences that encode (i) an amino acid sequence that can bind to and/or has affinity for the Tocilizumab (MRA) binding site on IL-6R (and in particular one or more of the 18 contact residues as described in Boulanger et al. 2003 (Science 300, 2101-2104) present in the extracellular D3 domain of the IL-6R, more preferably amino acid residues Phe229 and Phe279 present in the extracellular D3 domain of the IL-6R) and/or (ii) an amino acid sequence that can compete with Tocilizumab (MRA) for binding to IL-6R.

[0800] In another preferred aspect of the above method, the first amino acid sequence obtained in step b) is preferably such that (i) it can bind to and/or has affinity for the Tocilizumab (MRA) binding site on IL-6R (and in particular one or more of the 18 contact residues as described in Boulanger et al. 2003 (Science 300, 2101-2104) present in the extracellular D3 domain of the IL-6R, more preferably amino acid residues Phe229 and Phe279 present in the extracellular D3 domain of the IL-6R) and/or (ii) competes with Tocilizumab (MRA) for binding to IL-6R; and in step d), the set, collection or library of nucleic acid sequences is screened for nucleic acid sequences that encode (i) an amino acid sequence that can bind to and/or has affinity for the M182 binding site on IL-6R and/or (ii) an amino acid sequence that can compete with M182 for binding to the IL-6R.

[0801] Alternatively, the first amino acid sequence obtained in step b) is preferably such that (i) it can bind to and/or has affinity for the M182 binding site on IL-6R and/or (ii) competes with M182 for binding to the IL-6R; and in step d), the set, collection or library of nucleic acid sequences is screened for nucleic acid sequences that encode (i) an amino acid sequence that can bind to and/or has affinity for the Tocilizumab (MRA) binding site on IL-6R (and in particular one or more of the 18 contact residues as described in Boulanger et al. 2003 (Science 300, 2101-2104) present in the extracellular D3 domain of the IL-6R, more preferably amino acid residues Phe229 and Phe279 present in the extracellular D3 domain of the IL-6R) and/or (ii) an amino acid sequence that can compete with Tocilizumab (MRA) for binding to IL-6R.

[0802] In another preferred aspect of the above method, the first amino acid sequence obtained in step b) is preferably such that (i) it can bind to and/or has affinity for the Tocilizumab (MRA) binding site on IL-6R (and in particular one or more of the 18 contact residues as described in Boulanger et al. 2003 (Science 300, 2101-2104) present in the extracellular D3 domain of the IL-6R, more preferably amino acid residues Phe229 and Phe279 present in the extracellular D3 domain of the IL-6R) and/or (ii) competes with Tocilizumab (MRA) for binding to IL-6R; and in step d), the set, collection or library of nucleic acid sequences is screened for nucleic acid sequences that encode (i) an amino acid sequence that can bind to and/or has affinity for the BN-12 binding site on IL-6R and/or (ii) an amino acid sequence that can compete with BN-12 for binding to the IL-6R.

[0803] Alternatively, the first amino acid sequence obtained in step b) is preferably such that (i) it can bind to and/or has affinity for the BN-12 binding site on IL-6R and/or (ii) competes with BN-12 for binding to the IL-6R; and in step d), the set, collection or library of nucleic acid sequences is screened for nucleic acid sequences that encode (i) an amino acid sequence that can bind to and/or has affinity for the Tocilizumab (MRA) binding site on IL-6R (and in particular one or more of the 18 contact residues as described in Boulanger et al. 2003 (Science 300, 2101-2104) present in the extracellular D3 domain of the IL-6R, more preferably amino acid residues Phe229 and Phe279 present in the extracellular D3 domain of the IL-6R) and/or (ii) an amino acid sequence that can compete with Tocilizumab (MRA) for binding to IL-6R.

[0804] In another preferred aspect of the above method, the first amino acid sequence obtained in step b) is preferably such that (i) it can bind to and/or has affinity for the BN-12 binding site on IL-6R and/or (ii) competes with BN-12 for binding to IL-6R; and in step d), the set, collection or library of nucleic acid sequences is screened for nucleic acid sequences that encode (i) an amino acid sequence that can bind to and/or has affinity for the gp130 binding site on IL-6R or the IL-6/IL-6R complex and/or (ii) an amino acid sequence that can compete with gp130 for binding to the IL-6/IL-6R complex.

[0805] Alternatively, the first amino acid sequence obtained in step b) is preferably such that (i) it can bind to and/or has affinity for the gp130 binding site on IL-6R and/or the IL-6/IL-6R complex and/or (ii) competes with gp130 for binding to the IL-6/IL-6R complex; and in step d), the set, collection or library of nucleic acid sequences is screened for nucleic acid sequences that encode (i) an amino acid sequence that can bind to and/or has affinity for the BN-12 binding site on IL-6R and/or (ii) an amino acid sequence that can compete with BN-12 for binding to IL-6R.

[0806] In another preferred aspect of the above method, the first amino acid sequence obtained in step b) is preferably such that (1) it can bind to and/or has affinity for the BN-12 binding site on IL-6R and/or (ii) competes with BN-12 for binding to IL-6R; and in step d), the set, collection or library of nucleic acid sequences is screened for nucleic acid sequences that encode (i) an amino acid sequence that can bind to and/or has affinity for the M182 binding site on IL-6R and/or (ii) an amino acid sequence that can compete with M182 for binding to the IL-6R.

[0807] Alternatively, the first amino acid sequence obtained in step b) is preferably such that (i) it can bind to and/or has affinity for the M182 binding site on IL-6R and/or (ii) competes with M182 for binding to the IL-6R; and in step d), the set, collection or library of nucleic acid sequences is screened for nucleic acid sequences that encode (i) an amino acid sequence that can bind to and/or has affinity for the BN-12 binding site on IL-6R and/or (ii) an amino acid sequence that can compete with BN-12 for binding to IL-6R.

[0808] In the above methods, screening or selecting for (nucleic acid sequences that encode) amino acid sequences that compete with IL-6, gp130, Tocilizumab (MRA), BN-12 or M182, respectively, may be performed using generally known methods for screening or selecting for competitors of known binding molecules, which may for example involve performing the screening or selection in the presence of the binding molecule and/or determining the binding affinity of the compound(s) to be screened in the presence of the binding molecule.

[0809] It is also possible, in step d), to screen for nucleic acid sequences that both (i) encode an amino acid sequence that can bind to and/or has affinity for theft-6 binding site on IL-6R (and in particular one or more of the 18 contact residues as described in Boulanger et al. 2003 (Science 300, 2101-2104) present in the extracellular D3 domain of the IL-6R, more preferably amino acid residues Phe229 and Phe279 present in the extracellular D3 domain of the IL-6R) and/or that can compete with IL-6 for binding to IL-6R; and that also (ii) encode an amino acid sequence that can bind to and/or has affinity for the gp130 binding site on IL-6R and/or the IL-6/IL-6R complex and/or that can compete with gp130 for binding to the IL-6/IL-6R complex. Again, this may be performed in separate steps or a single step, and by selecting or screening in the presence of IL-6 and/or gp130, as applicable.

[0810] It is also possible, in step d), to screen for nucleic acid sequences that both (i) encode an amino acid sequence that can bind to and/or has affinity for the IL-6 binding site on IL-6R (and in particular one or more of the 18 contact residues as described in Boulanger et al. 2003 (Science 300, 2101-2104) present in the extracellular D3 domain of the IL-6R, more preferably amino acid residues Phe229 and Phe279 present in the extracellular D3 domain of the IL-6R) and/or that can compete with IL-6 for binding to IL-6R; and that also (ii) encode an amino acid sequence that can bind to and/or has affinity for the M182 binding site on IL-6R and/or that can compete with M182 for binding to IL-6R. Again, this may be performed in separate steps or a single step, and by selecting or screening in the presence of IL-6 and/or M182, as applicable.

[0811] It is also possible, in step d), to screen for nucleic acid sequences that both (i) encode an amino acid sequence that can bind to and/or has affinity for the IL-6 binding site on IL-6R (and in particular one or more of the 18 contact residues as described in Boulanger et al. 2003 (Science 300, 2101-2104) present in the extracellular D3 domain of the IL-6R, more preferably amino acid residues Phe229 and Phe279 present in the extracellular D3 domain of the IL-6R) and/or that can compete with IL-6 for binding to IL-6R; and that also (ii) encode an amino acid sequence that can bind to and/or has affinity for the BN-12 binding site on IL-6R and/or that can compete with BN-12 for binding to IL-6R. Again, this may be performed in separate steps or a single step, and by selecting or screening in the presence of IL-6 and/or BN-12, as applicable.

[0812] It is also possible, in step d), to screen for nucleic acid sequences that both (i) encode an amino acid sequence that can bind to and/or has affinity for the Tocilizumab (MRA) binding site on IL-6R (and in particular one or more of the 18 contact residues as described in Boulanger et al. 2003 (Science 300, 2101-2104) present in the extracellular D3 domain of the IL-6R, more preferably amino acid residues Phe229 and Phe279 present in the extracellular D3 domain of the IL-6R) and/or that can compete with Tocilizumab (MRA) for binding to IL-6R; and that also (ii) encode an amino acid sequence that can bind to and/or has affinity for the gp130 binding site on IL-6R and/or the IL-6/IL-6R complex and/or that can compete with gp130 for binding to the IL-6/IL-6R complex. Again, this may be performed in separate steps or a single step, and by selecting or screening in the presence of Tocilizumab (MRA) and/or gp130, as applicable.

[0813] It is also possible, in step d), to screen for nucleic acid sequences that both (i) encode an amino acid sequence that can bind to and/or has affinity for the Tocilizumab (MRA) binding site on IL-6R (and in particular one or more of the 18 contact residues as described in Boulanger et al. 2003 (Science 300, 2101-2104) present in the extracellular D3 domain of the IL-6R, more preferably amino acid residues Phe229 and Phe279 present in the extracellular D3 domain of the IL-6R) and/or that can compete with Tocilizumab (MRA) for binding to IL-6R; and that also (ii) encode an amino acid sequence that can bind to and/or has affinity for the M182 binding site on IL-6R and/or that can compete with M182 for binding to IL-6R. Again, this may be performed in separate steps or a single step, and by selecting or screening in the presence of Tocilizumab (MRA) and/or M182, as applicable.

[0814] It is also possible, in step d), to screen for nucleic acid sequences that both (i) encode an amino acid sequence that can bind to and/or has affinity for the Tocilizumab (MRA) binding site on IL-6R (and in particular one or more of the 18 contact residues as described in Boulanger et al. 2003 (Science 300, 2101-2104) present in the extracellular D3 domain of the IL-6R, more preferably amino acid residues Phe229 and Phe279 present in the extracellular D3 domain of the IL-6R) and/or that can compete with Tocilizumab (MRA) for binding to IL-6R; and that also (ii) encode an amino acid sequence that can bind to and/or has affinity for the BN-12 binding site on IL-6R and/or that can compete with BN-12 for binding to IL-6R. Again, this may be performed in separate steps or a single step, and by selecting or screening in the presence of Tocilizumab (MRA) and/or BN-12, as applicable.

[0815] It is also possible, in step d), to screen for nucleic acid sequences that both (1) encode an amino acid sequence that can bind to and/or has affinity for the BN-12 binding site on IL-6R and/or that can compete with BN-12 for binding to IL-6R; and that also (ii) encode an amino acid sequence that can bind to and/or has affinity for the gp130 binding site on IL-6R and/or the IL-6/IL-6R complex and/or that can compete with gp130 for binding to the IL-6/IL-6R complex. Again, this may be performed in separate steps or a single step, and by selecting or screening in the presence of Bn-12 and/or gp130, as applicable.

[0816] It is also possible, in step d), to screen for nucleic acid sequences that both (i) encode an amino acid sequence that can bind to and/or has affinity for the BN-12 binding site on IL-6R and/or that can compete with BN-12 for binding to IL-6R; and that also (ii) encode an amino acid sequence that can bind to and/or has affinity for the M182 binding site on IL-6R and/or that can compete with M182 for binding to IL-6R. Again, this may be performed in separate steps or a single step, and by selecting or screening in the presence of BN-12 and/or M182, as applicable.

[0817] The nucleic acid sequence encoding the biparatopic polypeptide obtained in the method above can subsequently be fused to one or more further sets, collections or libraries of nucleic acid sequences encoding amino acid sequences that can bind to and/or have affinity for IL-6R in order to obtain a triparatopic or multiparatopic amino acid sequence respectively.

[0818] In such a method, the set, collection or library of nucleic acid sequences encoding amino acid sequences may for example be a set, collection or library of nucleic acid sequences encoding a naïve set, collection or library of immunoglobulin sequences; a set, collection or library of nucleic acid sequences encoding a synthetic or semi-synthetic set, collection or library of immunoglobulin sequences; and/or a set, collection or library of nucleic acid sequences encoding a set, collection or library of immunoglobulin sequences that have been subjected to affinity maturation.

[0819] The set, collection or library of nucleic acid sequences that encode an amino acid sequence that can bind to and/or has affinity for IL-6R can be obtained by any selection or screening method known in the art for the selection and/or screening of nucleic acid sequences that encode an amino acid sequence that can bind to and/or has affinity for IL-6R and as, for example, described in the Examples section.

[0820] Also, in such a method, the set, collection or library of nucleic acid sequences may encode a set, collection or library of heavy chain variable domains (such as V_{H} domains or V_{HH} domains) or of light chain variable domains. For example, the set, collection or library of nucleic acid sequences may encode a set, collection or library of domain antibodies or single domain antibodies, or a set, collection or library of amino acid sequences that are capable of functioning as a domain antibody or single domain antibody.

[0821] In a preferred aspect of this method, the set, collection or library of nucleic acid sequences may be an immune set, collection or library of nucleic acid sequences, for example derived from a mammal that has been suitably immunized with IL-6R or with a suitable antigenic determinant based thereon or derived therefrom, such as an antigenic part, fragment, region, domain, loop or other epitope thereof. In one particular aspect, said antigenic determinant may be an extracellular part, region, domain, loop or other extracellular epitope(s).

[0822] The set, collection or library of nucleic acid sequences may for example encode an immune set, collection or library of heavy chain variable domains or of light chain variable domains. In one specific aspect, the set, collection or library of nucleotide sequences may encode a set, collection or library of V_{HH} sequences.

[0823] In the above methods, the nucleic acid sequence may be displayed on a phage, phagemid, ribosome or suitable micro-organism (such as yeast), such as to facilitate screening. Suitable methods, techniques and host organisms for displaying and screening (a set, collection or library of) nucleotide sequences encoding amino acid sequences will be clear to the person skilled in the art, for example on the basis of the further disclosure herein. Reference is also made to the review by Hoogenboom in Nature Biotechnology, 23, 9, 1105-1116 (2005).

[0824] As will be clear to the skilled person, the screening step of the methods described herein can also be performed as a selection step. Accordingly the term “screening” as used in the present description can comprise selection, screening or any suitable combination of selection and/or screening techniques. Also, when a set, collection or library of sequences is used, it may contain any suitable number of sequences, such as 1, 2, 3 or about 5, 10, 50, 100, 500, 1000, 5000, 10⁴, 10⁵, 10⁶, 10⁷, 10⁸ or more sequences.

[0825] Also, one or more or all of the sequences in the above set, collection or library of amino acid sequences may be obtained or defined by rational, or semi-empirical approaches such as computer modelling techniques or biostatics or datamining techniques.

[0826] Furthermore, such a set, collection or library can comprise one, two or more sequences that are variants from one another (e.g. with designed point mutations or with randomized positions), compromise multiple sequences derived from a diverse set of naturally diversified sequences (e.g. an immune library), or any other source of diverse sequences (as described for example in Hoogenboom et al. (Nat Biotechnol 23:1105, 2005) and Binz et al. (Nat Biotechnol 2005, 23:1247)). Such set, collection or library of sequences can be displayed on the surface of a phage particle, a ribosome, a bacterium, a yeast cell, a mammalian cell, and linked to the nucleotide sequence encoding the amino acid sequence within these carriers. This makes such set, collection or library amenable to selection procedures to isolate the desired amino acid sequences of the invention. More generally, when a sequence is displayed on a suitable host or host cell, it is also possible (and customary) to first isolate from said host or host cell a nucleotide sequence that encodes the desired sequence, and then to obtain the desired sequence by suitably expressing said nucleotide sequence in a suitable host organism. Again, this can be performed in any suitable manner known per se, as will be clear to the skilled person.

[0827] The invention also relates to the biparatopic polypeptides that are obtained by the above methods, or alternatively by a method that comprises one of the above methods and in addition at least the steps of determining the nucleotide sequence or amino acid sequence; and of expressing or synthesizing said amino acid sequence in a manner known per se, such as by expression in a suitable host cell or host organism or by chemical synthesis.

[0828] Another aspect of this invention relates to a nucleic acid that encodes an amino acid sequence of the invention (such as a Nanobody of the invention) or a polypeptide of the invention comprising the same. Again, as generally described herein for the nucleic acids of the invention, such a nucleic acid may be in the form of a genetic construct, as defined herein.

[0829] In another aspect, the invention relates to host or host cell that expresses or that is capable of expressing an amino acid sequence (such as a Nanobody) of the invention and/or a polypeptide of the invention comprising the same; and/or that contains a nucleic acid of the invention. Some preferred but non-limiting examples of such hosts or host cells will become clear from the further description herein.

[0830] Another aspect of the invention relates to a product or composition containing or comprising at least one amino acid sequence and/or Nanobody of the invention, at least one polypeptide of the invention and/or at least one nucleic acid of the invention, and optionally one or more further components of such compositions known per se, i.e. depending on the intended use of the composition. Such a product or composition may for example be a pharmaceutical composition (as described herein), a veterinary composition or a product or composition for diagnostic use (as also described herein). Some preferred but non-limiting examples of such products or compositions will become clear from the further description herein.

[0831] Generally, it should be noted that the term Nanobody as used herein in its broadest sense is not limited to a specific biological source or to a specific method of preparation. For example, as will be discussed in more detail below, the Nanobodies of the invention can generally be obtained by any of the techniques (1) to (8) mentioned on pages 61 and 62 of WO 08/020,079, or any other suitable technique known per se. One preferred class of Nanobodies corresponds to the V_{HH} domains of naturally occurring heavy chain antibodies directed against IL-6R. As further described herein, such V_{HH} sequences can generally be generated or obtained by suitably immunizing a species of Camelid with IL-6R (i.e. so as to raise an immune response and/or heavy chain antibodies directed against IL-6R), by obtaining a suitable biological sample from said Camelid (such as a blood sample, serum sample or sample of B-cells), and by generating V_{HH} sequences directed against IL-6R, starting from said sample, using any suitable technique known per se. Such techniques will be clear to the skilled person and/or are further described herein.

[0832] Alternatively, such naturally occurring V_{HH} domains against IL-6R, can be obtained from naïve libraries of Camelid V_{HH} sequences, for example by screening such a library using IL-6R, or at least one part, fragment, antigenic determinant or epitope thereof using one or more screening techniques known per se. Such libraries and techniques are for example described in WO 99/37681, WO 01/90190, WO 03/025020 and WO 03/035694. Alternatively, improved synthetic or semi-synthetic libraries derived from naïve V_{HH} libraries may be used, such as V_{HH} libraries obtained from naïve V_{HH} libraries by techniques such as random mutagenesis and/or CDR shuffling, as for example described in WO 00/43507.

[0833] As mentioned herein, a particularly preferred class of Nanobodies of the invention comprises Nanobodies with an amino acid sequence that corresponds to the amino acid sequence of a naturally occurring V_{HH} domain, but that has been “humanized”, i.e. by replacing one or more amino acid residues in the amino acid sequence of said naturally occurring V_{HH} sequence (and in particular in the framework sequences) by one or more of the amino acid residues that occur at the corresponding position(s) in a V_{H} domain from a conventional 4-chain antibody from a human being (e.g. indicated above), as further described on, and using the techniques mentioned on, page 63 of WO 08/020,079. Another particularly preferred class of Nanobodies of the invention comprises Nanobodies with an amino acid sequence that corresponds to the amino acid sequence of a naturally occurring V_{H} domain, but that has been “camelized”, i.e. by replacing one or more amino acid residues in the amino acid sequence of a naturally occurring V_{H} domain from a conventional 4-chain antibody by one or more of the amino acid residues that occur at the corresponding position(s) in a V_{HH} domain of a heavy chain antibody, as further described on, and using the techniques mentioned on, page 63 of WO 08/020,079.

[0834] Other suitable methods and techniques for obtaining the Nanobodies of the invention and/or nucleic acids encoding the same, starting from naturally occurring V_{H} sequences or preferably V_{HH} sequences, will be clear from the skilled person, and may for example include the techniques that are mentioned on page 64 of WO 08/00279As mentioned herein, Nanobodies may in particular be characterized by the presence of one or more “Hallmark residues” (as described herein) in one or more of the framework sequences.

[0835] Thus, according to one preferred, but non-limiting aspect of the invention, a Nanobody in its broadest sense can be generally defined as a polypeptide comprising:
[0836] a) an amino acid sequence that is comprised of four framework regions/sequences interrupted by three complementarity determining regions/sequences, in which the amino acid residue at position 108 according to the Kabat numbering is Q;
   and/or:
[0837] b) an amino acid sequence that is comprised of four framework regions/sequences interrupted by three complementarity determining regions/sequences, in which the amino acid residue at position 45 according to the Kabat numbering is a charged amino acid (as defined herein) or a cysteine residue, and position 44 is preferably an E;
   and/or:
[0838] c) an amino acid sequence that is comprised of four framework regions/sequences interrupted by three complementarity determining regions/sequences, in which the amino acid residue at position 103 according to the Kabat numbering is chosen from the group consisting of P, R and 5, and is in particular chosen from the group consisting of R and S.

[0839] Thus, in a first preferred, but non-limiting aspect, a Nanobody of the invention may have the structure

FR1-CDR1-FR2-CDR2-FR3-CDR3-FR4

in which FR1 to FR4 refer to framework regions 1 to 4, respectively, and in which CDR1 to CDR3 refer to the complementarity determining regions 1 to 3, respectively, and in which
[0840] a) the amino acid residue at position 108 according to the Kabat numbering is Q;
   and/or in which:
[0841] b) the amino acid residue at position 45 according to the Kabat numbering is a charged amino acid or a cysteine and the amino acid residue at position 44 according to the Kabat numbering is preferably E;
   and/or in which:
[0842] c) the amino acid residue at position 103 according to the Kabat numbering is chosen from the group consisting of P, R and S, and is in particular chosen from the group consisting of R and 5;
   and in which:
[0843] d) CDR1, CDR2 and CDR3 are as defined herein, and are preferably as defined according to one of the preferred aspects herein, and are more preferably as defined according to one of the more preferred aspects herein.

[0844] In particular, a Nanobody in its broadest sense can be generally defined as a polypeptide comprising:
[0845] a) an amino acid sequence that is comprised of four framework regions/sequences interrupted by three complementarity determining regions/sequences, in which the amino acid residue at position 108 according to the Kabat numbering is Q;
   and/or:
[0846] b) an amino acid sequence that is comprised of four framework regions/sequences interrupted by three complementarity determining regions/sequences, in which the amino acid residue at position 44 according to the Kabat numbering is E and in which the amino acid residue at position 45 according to the Kabat numbering is an R;
   and/or:
[0847] c) an amino acid sequence that is comprised of four framework regions/sequences interrupted by three complementarity determining regions/sequences, in which the amino acid residue at position 103 according to the Kabat numbering is chosen from the group consisting of P, R and 5, and is in particular chosen from the group consisting of R and S.

[0848] Thus, according to a preferred, but non-limiting aspect, a Nanobody of the invention may have the structure

FR1-CDR1-FR2-CDR2-FR3-CDR3-FR4

in which FR1 to FR4 refer to framework regions 1 to 4, respectively, and in which CDR1 to CDR3 refer to the complementarity determining regions 1 to 3, respectively, and in which
[0849] a) the amino acid residue at position 108 according to the Kabat numbering is Q;
   and/or in which:
[0850] b) the amino acid residue at position 44 according to the Kabat numbering is E and in which the amino acid residue at position 45 according to the Kabat numbering is an R;
   and/or in which:
[0851] c) the amino acid residue at position 103 according to the Kabat numbering is chosen from the group consisting of P, R and S, and is in particular chosen from the group consisting of R and 5;
   and in which:
[0852] d) CDR1, CDR2 and CDR3 are as defined herein, and are preferably as defined according to one of the preferred aspects herein, and are more preferably as defined according to one of the more preferred aspects herein.

[0853] In particular, a Nanobody against IL-6R according to the invention may have the structure:

FR1-CDR1-FR2-CDR2-FR3-CDR3-FR4

in which FR1 to FR4 refer to framework regions 1 to 4, respectively, and in which CDR1 to CDR3 refer to the complementarity determining regions 1 to 3, respectively, and in which
[0854] a) the amino acid residue at position 108 according to the Kabat numbering is Q;
   and/or in which:
[0855] b) the amino acid residue at position 44 according to the Kabat numbering is E and in which the amino acid residue at position 45 according to the Kabat numbering is an R;
   and/or in which:
[0856] c) the amino acid residue at position 103 according to the Kabat numbering is chosen from the group consisting of P, R and S, and is in particular chosen from the group consisting of R and S;
   and in which:
[0857] d) CDR1, CDR2 and CDR3 are as defined herein, and are preferably as defined according to one of the preferred aspects herein, and are more preferably as defined according to one of the more preferred aspects herein.

[0858] In particular, according to one preferred, but non-limiting aspect of the invention, a Nanobody can generally be defined as a polypeptide comprising an amino acid sequence that is comprised of four framework regions/sequences interrupted by three complementarity determining regions/sequences, in which;
[0859] a-1) the amino acid residue at position 44 according to the Kabat numbering is chosen from the group consisting of A, G, E, D, G, Q, R, S, L; and is preferably chosen from the group consisting of G, E or Q; and
[0860] a-2) the amino acid residue at position 45 according to the Kabat numbering is chosen from the group consisting of L, R or C; and is preferably chosen from the group consisting of L or R; and
[0861] a-3) the amino acid residue at position 103 according to the Kabat numbering is chosen from the group consisting of W, R or 5; and is preferably W or R, and is most preferably W;
[0862] a-4) the amino acid residue at position 108 according to the Kabat numbering is Q;
   or in which:
[0863] b-1) the amino acid residue at position 44 according to the Kabat numbering is chosen from the group consisting of E and Q; and
[0864] b-2) the amino acid residue at position 45 according to the Kabat numbering is R; and
[0865] b-3) the amino acid residue at position 103 according to the Kabat numbering is chosen from the group consisting of W, R and 5; and is preferably W;
[0866] b-4) the amino acid residue at position 108 according to the Kabat numbering is chosen from the group consisting of Q and L; and is preferably Q;
   or in which:
[0867] c-1) the amino acid residue at position 44 according to the Kabat numbering is chosen from the group consisting of A, G, E, D, Q, R, S and L; and is preferably chosen from the group consisting of G, E and Q; and
[0868] c-2) the amino acid residue at position 45 according to the Kabat numbering is chosen from the group consisting of L, R and C; and is preferably chosen from the group consisting of L and R; and
[0869] c-3) the amino acid residue at position 103 according to the Kabat numbering is chosen from the group consisting of P, R and 5; and is in particular chosen from the group consisting of R and 5; and
[0870] c-4) the amino acid residue at position 108 according to the Kabat numbering is chosen from the group consisting of Q and L; is preferably Q;
   and in which
[0871] d) CDR1, CDR2 and CDR3 are as defined herein, and are preferably as defined according to one of the preferred aspects herein, and are more preferably as defined according to one of the more preferred aspects herein.

[0872] Thus, in another preferred, but non-limiting aspect, a Nanobody of the invention may have the structure

FR1-CDR1-FR2-CDR2-FR3-CDR3-FR4

in which FR1 to FR4 refer to framework regions 1 to 4, respectively, and in which CDR1 to CDR3 refer to the complementarity determining regions 1 to 3, respectively, and in which:
[0873] a-1) the amino acid residue at position 44 according to the Kabat numbering is chosen from the group consisting of A, G, E, Q, G, Q, R, S, L; and is preferably chosen from the group consisting of G, E or Q;
   and in which:
[0874] a-2) the amino acid residue at position 45 according to the Kabat numbering is chosen from the group consisting of L, R or C; and is preferably chosen from the group consisting of L or R;
   and in which:
[0875] a-3) the amino add residue at position 103 according to the Kabat numbering is chosen from the group consisting of W, R or 5; and is preferably W or R, and is most preferably W;
   and in which
[0876] a-4) the amino acid residue at position 108 according to the Kabat numbering is Q;
   and in which:
[0877] d) CDR1, CDR2 and CDR3 are as defined herein, and are preferably as defined according to one of the preferred aspects herein, and are more preferably as defined according to one of the more preferred aspects herein.

[0878] In another preferred, but non-limiting aspect, a Nanobody of the invention may have the structure

FR1-CDR1-FR2-CDR2-FR3-CDR3-FR4

in which FR1 to FR4 refer to framework regions 1 to 4, respectively, and in which CDR1 to CDR3 refer to the complementarity determining regions 1 to 3, respectively, and in which:
[0879] b-1) the amino acid residue at position 44 according to the Kabat numbering is chosen from the group consisting of E and Q;
   and in which:
[0880] b-2) the amino acid residue at position 45 according to the Kabat numbering is R;
   and in which:
[0881] b-3) the amino acid residue at position 103 according to the Kabat numbering is chosen from the group consisting of W, R and S; and is preferably W;
   and in which:
[0882] b-4) the amino acid residue at position 108 according to the Kabat numbering is chosen from the group consisting of Q and L; and is preferably Q;
   and in which:
[0883] d) CDR1, CDR2 and CDR3 are as defined herein, and are preferably as defined according to one of the preferred aspects herein, and are more preferably as defined according to one of the more preferred aspects herein.

[0884] In another preferred, but non-limiting aspect, a Nanobody of the invention may have the structure

FR1-CDR1-FR2-CDR2-FR3-CDR3-FR4

in which FR1 to FR4 refer to framework regions 1 to 4, respectively, and in which CDR1 to CDR3 refer to the complementarity determining regions 1 to 3, respectively, and in which:
[0885] c-1) the amino acid residue at position 44 according to the Kabat numbering is chosen from the group consisting of A, G, E, D, Q, R, S and L; and is preferably chosen from the group consisting of G, E and Q;
   and in which:
[0886] c-2) the amino acid residue at position 45 according to the Kabat numbering is chosen from the group consisting of L, R and C; and is preferably chosen from the group consisting of L and R;
   and in which:
[0887] c-3) the amino acid residue at position 103 according to the Kabat numbering is chosen from the group consisting of P, R and S; and is in particular chosen from the group consisting of R and 5;
   and in which:
[0888] c-4) the amino acid residue at position 108 according to the Kabat numbering is chosen from the group consisting of Q and L; is preferably Q;
   and in which:
[0889] d) CDR1, CDR2 and CDR3 are as defined herein, and are preferably as defined according to one of the preferred aspects herein, and are more preferably as defined according to one of the more preferred aspects herein.

[0890] Two particularly preferred, but non-limiting groups of the Nanobodies of the invention are those according to a) above; according to (a-1) to (a-4) above; according to b) above; according to (b-1) to (b-4) above; according to (c) above; and/or according to (c-1) to (c-4) above, in which either:
[0891] i) the amino acid residues at positions 44-47 according to the Kabat numbering form the sequence GLEW (or a GLEW-like sequence as described herein) and the amino acid residue at position 108 is Q;
   or in which:
[0892] ii) the amino acid residues at positions 43-46 according to the Kabat numbering form the sequence KERE or KQRE (or a KERE-like sequence as described) and the amino acid residue at position 108 is Q or L, and is preferably Q.

[0893] Thus, in another preferred, but non-limiting aspect, a Nanobody of the invention may have the structure

FR1-CDR1-FR2-CDR2-FR3-CDR3-FR4

in which FR1 to FR4 refer to framework regions 1 to 4, respectively, and in which CDR1 to CDR3 refer to the complementarity determining regions 1 to 3, respectively, and in which:
[0894] i) the amino add residues at positions 44-47 according to the Kabat numbering form the sequence GLEW (or a GLEW-Like sequence as defined herein) and the amino acid residue at position 108 is Q;
   and in which:
[0895] ii) CDR1, CDR2 and CDR3 are as defined herein, and are preferably as defined according to one of the preferred aspects herein, and are more preferably as defined according to one of the more preferred aspects herein.

[0896] In another preferred, but non-limiting aspect, a Nanobody of the invention may have the structure

FR1-CDR1-FR2-CDR2-FR3-CDR3-FR4

in which FR1 to FR4 refer to framework regions 1 to 4, respectively, and in which CDR1 to CDR3 refer to the complementarity determining regions 1 to 3, respectively, and in which:
[0897] i) the amino acid residues at positions 43-46 according to the Kabat numbering form the sequence KERE or KQRE (or a KERE-like sequence) and the amino acid residue at position 108 is Q or L, and is preferably Q;
   and in which:
[0898] ii) CDR1, CDR2 and CDR3 are as defined herein, and are preferably as defined according to one of the preferred aspects herein, and are more preferably as defined according to one of the more preferred aspects herein.

[0899] In the Nanobodies of the invention in which the amino acid residues at positions 43-46 according to the Kabat numbering form the sequence KERE or KQRE, the amino acid residue at position 37 is most preferably F. In the Nanobodies of the invention in which the amino acid residues at positions 44-47 according to the Kabat numbering form the sequence GLEW, the amino acid residue at position 37 is chosen from the group consisting of Y, H, I, L, V or F, and is most preferably V.

[0900] Thus, without being limited hereto in any way, on the basis of the amino acid residues present on the positions mentioned above, the Nanobodies of the invention can generally be classified on the basis of the following three groups:
[0901] i) The “GLEW-group”: Nanobodies with the amino acid sequence GLEW at positions 44-47 according to the Kabat numbering and Q at position 108 according to the Kabat numbering. As further described herein, Nanobodies within this group usually have a V at position 37, and can have a W, P, R or S at position 103, and preferably have a W at position 103. The GLEW group also comprises some GLEW-like sequences such as those mentioned in Table B-2 below. More generally, and without limitation, Nanobodies belonging to the GLEW-group can be defined as Nanobodies with a G at position 44 and/or with a W at position 47, in which position 46 is usually E and in which preferably position 45 is not a charged amino acid residue and not cysteine;
[0902] ii) The “KERE-group”: Nanobodies with the amino acid sequence KERE or KQRE (or another KERE-like sequence) at positions 43-46 according to the Kabat numbering and Q or L at position 108 according to the Kabat numbering. As further described herein, Nanobodies within this group usually have a F at position 37, an L or F at position 47; and can have a W, P, R or S at position 103, and preferably have a W at position 103. More generally, and without limitation, Nanobodies belonging to the KERE-group can be defined as Nanobodies with a K, Q or R at position 44 (usually K) in which position 45 is a charged amino acid residue or cysteine, and position 47 is as further defined herein;
[0903] iii) The “103 P, R, S-group”: Nanobodies with a P, R or S at position 103. These Nanobodies can have either the amino acid sequence GLEW at positions 44-47 according to the Kabat numbering or the amino acid sequence KERE or KQRE at positions 43-46 according to the Kabat numbering, the latter most preferably in combination with an F at position 37 and an L or an F at position 47 (as defined for the KERE-group); and can have Q or L at position 108 according to the Kabat numbering, and preferably have Q.

[0904] Also, where appropriate, Nanobodies may belong to (i.e. have characteristics of) two or more of these classes. For example, one specifically preferred group of Nanobodies has GLEW or a GLEW-like sequence at positions 44-47; P, R or S (and in particular R) at position 103; and Q at position 108 (which may be humanized to L).

[0905] More generally, it should be noted that the definitions referred to above describe and apply to Nanobodies in the form of a native (i.e. non-humanized) V_{HH} sequence, and that humanized variants of these Nanobodies may contain other amino acid residues than those indicated above (i.e. one or more humanizing substitutions as defined herein). For example, and without limitation, in some humanized Nanobodies of the GLEW-group or the 103 P, R, S-group, Q at position 108 may be humanized to 108L. As already mentioned herein, other humanizing substitutions (and suitable combinations thereof) will become clear to the skilled person based on the disclosure herein. In addition, or alternatively, other potentially useful humanizing substitutions can be ascertained by comparing the sequence of the framework regions of a naturally occurring V_{HH} sequence with the corresponding framework sequence of one or more closely related human V_{H} sequences, after which one or more of the potentially useful humanizing substitutions (or combinations thereof) thus determined can be introduced into said V_{HH} sequence (in any manner known per se, as further described herein) and the resulting humanized V_{HH} sequences can be tested for affinity for the target, for stability, for ease and level of expression, and/or for other desired properties. In this way, by means of a limited degree of trial and error, other suitable humanizing substitutions (or suitable combinations thereof) can be determined by the skilled person based on the disclosure herein. Also, based on the foregoing, (the framework regions of) a Nanobody may be partially humanized or fully humanized.

[0906] Thus, in another preferred, but non-limiting aspect, a Nanobody of the invention may be a Nanobody belonging to the CLEW-group (as defined herein), and in which CDR1, CDR2 and CDR3 are as defined herein, and are preferably as defined according to one of the preferred aspects herein, and are more preferably as defined according to one of the more preferred aspects herein.

[0907] In another preferred, but non-limiting aspect, a Nanobody of the invention may be a Nanobody belonging to the KERE-group (as defined herein), and CDR1, CDR2 and CDR3 are as defined herein, and are preferably as defined according to one of the preferred aspects herein, and are more preferably as defined according to one of the more preferred aspects herein.

[0908] Thus, in another preferred, but non-limiting aspect, a Nanobody of the invention may be a Nanobody belonging to the 103 P, R, S-group (as defined herein), and in which CDR1, CDR2 and CDR3 are as defined herein, and are preferably as defined according to one of the preferred aspects herein, and are more preferably as defined according to one of the more preferred aspects herein.

[0909] Also, more generally and in addition to the 108Q, 43E/44R and 103 P, R, S residues mentioned above, the Nanobodies of the invention can contain, at one or more positions that in a conventional V_{H} domain would form (part of) the V_{H}/V_{L} interface, one or more amino acid residues that are more highly charged than the amino acid residues that naturally occur at the same position(s) in the corresponding naturally occurring V_{H} sequence, and in particular one or more charged amino acid residues (as mentioned in Table A-2 on page 48 of the International application WO 08/020,079). Such substitutions include, but are not limited to, the CLEW-like sequences mentioned in Table B-2 below; as well as the substitutions that are described in the International Application WO 00/29004 for so-called “microbodies”, e.g. so as to obtain a Nanobody with Q at position 108 in combination with KLEW at positions 44-47. Other possible substitutions at these positions will be clear to the skilled person based upon the disclosure herein.

[0910] In one aspect of the Nanobodies of the invention, the amino acid residue at position 83 is chosen from the group consisting of L, M, S, V and W; and is preferably L.

[0911] Also, in one aspect of the Nanobodies of the invention, the amino acid residue at position 83 is chosen from the group consisting of R, K, N, E, G, I, T and 0; and is most preferably either K or E (for Nanobodies corresponding to naturally occurring V_{HH} domains) or R (for “humanized” Nanobodies, as described herein). The amino acid residue at position 84 is chosen from the group consisting of P, A, R, S, D T, and V in one aspect, and is most preferably P (for Nanobodies corresponding to naturally occurring V_{HH} domains) or R (for “humanized” Nanobodies, as described herein).

[0912] Furthermore, in one aspect of the Nanobodies of the invention, the amino acid residue at position 104 is chosen from the group consisting of G and D; and is most preferably G.

[0913] Collectively, the amino acid residues at positions 11, 37, 44, 45, 47, 83, 84, 103, 104 and 108, which in the Nanobodies are as mentioned above, will also be referred to herein as the “Hallmark Residues”. The Hallmark Residues and the amino acid residues at the corresponding positions of the most closely related human V_{H} domain, V_{H}3, are summarized in Table B-2.

[0914] Some especially preferred but non-limiting combinations of these Hallmark Residues as occur in naturally occurring V_{HH} domains are mentioned in Table 8-3. For comparison, the corresponding amino acid residues of the human V_{H}3 called DP-47 have been indicated in italics.

TABLE B-2
Hallmark Residues in Nanobodies

| Position | Human V_{H}3 | Hallmark Residues |
|---|---|---|
| 11 | L, V; | L, S, V, M, W, F, T, Q, E, A, R, G, K, Y, |
| | predominantly L | N, P, I; preferably L |
| 37 | V, I, F; | F⁽¹⁾, Y, V, L, A, H, S, I, W, C, N, G, D, T, |
| | usually V | P, preferably F⁽¹⁾ or Y |
| 44⁽⁸⁾ | G | E⁽³⁾, Q⁽³⁾, G⁽²⁾, D, A, K, R, L, P, S, V, H, T, |
| | | N, W, M, I; |
| | | preferably G⁽²⁾, E⁽³⁾ or Q⁽³⁾; most preferably |
| | | G⁽²⁾ or Q⁽³⁾ |
| 45⁽⁸⁾ | L | L⁽²⁾, R⁽³⁾, P, H, F, G, Q, S, E, T, Y, C, I, D, |
| | | V; preferably L⁽²⁾ or R⁽³⁾ |
| 47⁽⁸⁾ | W, Y | F⁽¹⁾, L⁽¹⁾ or W⁽²⁾ G, I, S, A, V, M, R, Y, E, |
| | | P, T, C, H, K, Q, N, D; preferably W⁽²⁾, L⁽¹⁾ |
| | | or F⁽¹⁾ |
| 83 | R or K; | R, K⁽⁵⁾, T, E⁽⁵⁾, Q, N, S, I, V, G, M, L, A, |
| | usually R | D, Y, H; preferably K or R; most preferably |
| | | K |
| 84 | A, T, D; | P⁽⁵⁾, S, H, L, A, V, I, T, F, D, R, Y, N, Q, |
| | predominantly A | G, E; preferably P |
| 103 | W | W⁽⁴⁾, R⁽⁶⁾, G, S, K, A, M, Y, L, F, T, N, V, |
| | | Q, P⁽⁶⁾, E, C; preferably W |
| 104 | G | G, A, S, T, D, P, N, E, C, L; preferably G |
| 108 | L, M or T; | Q, L⁽⁷⁾, R, P, E, K, S, T, M, A, H; |
| | predominantly L | preferably Q or L⁽⁷⁾ |

Notes:
⁽¹⁾In particular, but not exclusively, in combination with KERE or KQRE at positions 43-46.
⁽²⁾Usually as GLEW at positions 44-47.
⁽³⁾Usually as KERE or KQRE at positions 43-46, e.g. as KEREL, KEREF, KQREL, KQREF, KEREG, KQREW or KQREG at positions 43-47. Alternatively, also sequences such as TERE (for example TEREL), TQRE (for example TQREL), KECE (for example KECEL or KECER), KQCE (for example KQCEL), RERE (for example REREG), RQRE (for example RQREL, RQREF or RQREW), QERE (for example QEREG), QQRE, (for example QQREW, QQREL or QQREF), KGRE (for example KGREG), KDRE (for example KDREV) are possible. Some other possible, but less preferred sequences include for example DECKL and NVCEL.
⁽⁴⁾With both GLEW at positions 44-47 and KERE or KQRE at positions 43-46.
⁽⁵⁾Often as KP or EP at positions 83-84 of naturally occurring V_{HH} domains.
⁽⁶⁾In particular, but not exclusively, in combination with GLEW at positions 44-47.
⁽⁷⁾With the proviso that when positions 44-47 are GLEW, position 108 is always Q in (non-humanized) V_{HH} sequences that also contain a W at 103.
⁽⁸⁾The GLEW group also contains GLEW-like sequences at positions 44-47, such as for example GVEW, EPEW, GLER, DQEW, DLEW, GIEW, ELEW, GPEW, EWLP, GPER, GLER and ELEW.

TABLE B-3
Some preferred but non-limiting combinations of Hallmark
Residues in naturally occurring Nanobodies.

| | 11 | 37 | 44 | 45 | 47 | 83 | 84 | 103 | 104 | 108 |
|---|---|---|---|---|---|---|---|---|---|---|
| DP-47 (human) | M | V | G | L | W | R | A | W | G | L |
| “KERE” group | L | F | E | R | L | K | P | W | G | Q |
| | L | F | E | R | F | E | P | W | G | Q |
| | L | F | E | R | F | K | P | W | G | Q |
| | L | Y | Q | R | L | K | P | W | G | Q |
| | L | F | L | R | V | K | P | Q | G | Q |
| | L | F | Q | R | L | K | P | W | G | Q |
| | L | F | E | R | F | K | P | W | G | Q |
| “GLEW” group | L | V | G | L | W | K | S | W | G | Q |
| | M | V | G | L | W | K | P | R | G | Q |

For humanization of these combinations, reference is made to the specification.

[0915] In the Nanobodies, each amino acid residue at any other position than the Hallmark Residues can be any amino acid residue that naturally occurs at the corresponding position (according to the Kabat numbering) of a naturally occurring V_{HH} domain.

[0916] Such amino acid residues will be clear to the skilled person. Tables 8-4 to 8-7 mention some non-limiting residues that can be present at each position (according to the Kabat numbering) of the FR1, FR2, FR3 and FR4 of naturally occurring V_{HH} domains. For each position, the amino acid residue that most frequently occurs at each position of a naturally occurring V_{HH} domain (and which is the most preferred amino acid residue for said position in a Nanobody) is indicated in bold; and other preferred amino acid residues for each position have been underlined (note: the number of amino acid residues that are found at positions 26-30 of naturally occurring V_{HH} domains supports the hypothesis underlying the numbering by Chothia (supra) that the residues at these positions already form part of CDR1).

[0917] In Tables B-4-B-7, some of the non-limiting residues that can be present at each position of a human V_{H}3 domain have also been mentioned. Again, for each position, the amino acid residue that most frequently occurs at each position of a naturally occurring human V_{H}3 domain is indicated in bold; and other preferred amino acid residues have been underlined.

[0918] For reference only, Tables B-4-B-7 also contain data on the V_{HH} entropy (“V_{HH} Ent.”) and V_{HH} variability (“V_{HH} Var.”) at each amino acid position for a representative sample of 7732 V_{HH} sequences (including a.o. data kindly provided by David Lutje Hulsing and Prof. Theo Verrips of Utrecht University). The values for the V_{HH} entropy and the V_{HH} variability provide a measure for the variability and degree of conservation of amino acid residues between the 7732 V_{HH} sequences analyzed: low values (i.e. <1, such as <0.5) indicate that an amino acid residue is highly conserved between the V_{HH} sequences (i.e. little variability). For example, the G at position 9 and the W at position 36 have values for the V_{HH} entropy of 0.01 and 0 respectively, indicating that these residues are highly conserved and have little variability (and in case of position 36 is W in all 7732 sequences analysed), whereas for residues that form part of the CDR's generally values of 1.5 or more are found (data not shown). Note that the data represented below support the hypothesis that the amino acid residues at positions 27-30 and maybe even also at positions 93 and 94 already form part of the CDR's (although the invention is not limited to any specific hypothesis or explanation, and as mentioned above, herein the numbering according to Kabat is used). For a general explanation of sequence entropy, sequence variability and the methodology for determining the same, see Oliveira et al., PROTEINS: Structure, Function and Genetics, 52: 544-552 (2003).

TABLE B-4
Non-limiting examples of amino acid residues in FR1 (for the footnotes, see the footnotes to
Table B-2)

| | Amino acid residue(s): | | V_{HH} | V_{HH} |
|---|---|---|---|---|
| Pos. | Human V_{H}3 | Camelid V_{HH}'s | Ent. | Var. |
| 1 | E, Q | E, Q, K, D, A, G, R | 0.47 | 5 |
| 2 | V | V, M, A, E, L | 0.04 | 1 |
| 3 | Q | Q, K, P, H, F, R | 0.04 | 1 |
| 4 | L | L, M, Q, P, R, F, V | 0.02 | 1 |
| 5 | V, L | V, Q, M, E, A, L, P, K, R | 0.35 | 3 |
| 6 | E | E, A, Q, D, K, H | 0.21 | 5 |
| 7 | S, T | S, F, L, W, T | 0.05 | 2 |
| 8 | G, R | G, R, E, V | 0.04 | 1 |
| 9 | G | G, R, V, A | 0.01 | 1 |
| 10 | G, V | G, D, R, S, K, E, A, Q, N, T, V | 0.22 | 4 |
| 11 | Hallmark residue: L, S, V, M, W, F, T, Q, E, A, R, G, K, Y, N, P, I; | | 0.35 | 4 |
| | preferably L | | | |
| 12 | V, I | V, A, L, M, E, G, T | 0.11 | 2 |
| 13 | Q, K, R | Q, L, R, H, P, E, K, T, S, V, D, G, A, N, M | 0.46 | 3 |
| 14 | P | A, P, T, V, S, D, F, N, I, E, L, R, G, Y, Q, H | 0.92 | 5 |
| 15 | G | G, E | 0 | 1 |
| 16 | G, R | G, D, E, A, S, N, V, R, K, T, P, C, L | 0.47 | 4 |
| 17 | S | S, F, P, Y, T, A, C, R, N | 0.14 | 2 |
| 18 | L | L, V, R, M, P, Q, S, A, T, K, H | 0.06 | 1 |
| 19 | R, K | R, T, K, S, N, G, A, I, L, Q, F, E, V, M | 0.36 | 4 |
| 20 | L | L, F, V, I, P, H, S | 0.18 | 3 |
| 21 | S | S, A, T, P, F, V, H, D, R, L, I, G | 0.13 | 3 |
| 22 | C | C, W | 0 | 1 |
| 23 | A, T | A, V, T, E, S, L, G, I, K, Q, R, D, F, N, P, M | 0.88 | 5 |
| 24 | A | A, D, V, T, H, Y, P, G, S, F, L, I, N, Q, E, R | 0.78 | 9 |
| 25 | S | S, P, T, A, F, L, N, Y, R, H, D, V, I, W, G, K, Q, C | 0.2 | 2 |
| 26 | G | G, E, R, V, T, A, S, K, D, L, I, Q, N, F, Y, M, W, P, H | 0.45 | 6 |
| 27 | F | R, F, S, P, L, G, I, N, T, D, H, V, E, A, Y, K, M, Q, W, C | 1.89 | 12 |
| 28 | T | T, I, S, A, P, F, D, N, V, R, M, L, G, Y, K, E, H, W, Q | 1.29 | 12 |
| 29 | F, V | F, L, S, V, I, A, W, Y, G, D, R, T, P, N, E, M, H, Q, K, C | 1.23 | 11 |
| 30 | S, D, G | S, D, N, G, R, T, A, E, I, Y, K, V, H, L, F, W, M, P, C, Q | 1.55 | 12 |

TABLE B-5
Non-limiting examples of amino acid residues in FR2 (for the footnotes,
see the footnotes to Table B-2)

| | Amino acid residue(s): | | V_{HH} | V_{HH} |
|---|---|---|---|---|
| Pos. | Human V_{H}3 | Camelid V_{HH}'s | Ent. | Var. |
| 36 | W | W | 0 | 1 |
| 37 | Hallmark residue: F⁽¹⁾, Y, V, L, A, H, S, I, W, C, N, G, D, T, P, | | 1.1 | 7 |
| | preferably F⁽¹⁾ or Y | | | |
| 38 | R | R, H, C, P, Y, L, V | 0.01 | 1 |
| 39 | Q | Q, E, R, H, L, A, S, K, P, V, T, D | 0.22 | 3 |
| 40 | A | A, V, T, P, G, S, D, I, L, R, N, F, Y, C, E, H | 0.55 | 6 |
| 41 | P, S, T | P, S, A, L, T, Q, R, V, D, G, I, H | 0.18 | 3 |
| 42 | G | G, E, A, R, D, V, W, T, Q, K, L, N, H, M | 0.1 | 2 |
| 43 | K | K, N, Q, E, R, T, L, S, M, D, G, A, V, H, I, F, P | 0.45 | 7 |
| 44 | Hallmark residue: E⁽³⁾, Q⁽³⁾, G⁽²⁾, D, A, K, R, L, P, S, V, H, T, N, | | 1.11 | 4 |
| | W, M, I; preferably G⁽²⁾, E⁽³⁾ or Q⁽³⁾; most preferably G⁽²⁾ or Q⁽³⁾ | | | |
| 45 | Hallmark residue: L⁽²⁾, R⁽³⁾, P, H, F, G, Q, S, E, T, Y, C, I, D, V; | | 0.56 | 3 |
| | preferably L⁽²⁾ or R⁽³⁾ | | | |
| 46 | E, V | E, D, A, Q, V, M, K, T, G, R, S, N, I, L, F | 0.42 | 4 |
| 47 | Hallmark residue: F⁽¹⁾, L⁽¹⁾ or W⁽²⁾ G, I, S, A, V, M, R, Y, E, P, T, | | 1.64 | 11 |
| | C, H, K, Q, N, D; preferably W⁽²⁾, L⁽¹⁾ or F⁽¹⁾ | | | |
| 48 | V | V, I, L, A, T, Q, F, M, G, E, R | 0.35 | 5 |
| 49 | S, A, G | A, S, G, T, V, L, C, I, F, P, E, Y, M, D, R | 0.89 | 5 |

TABLE B-6
Non-limiting examples of amino acid residues in FR3 (for the footnotes,
see the footnotes to Table B-2)

| | Amino acid residue(s): | | V_{HH} | V_{HH} |
|---|---|---|---|---|
| Pos. | Human V_{H}3 | Camelid V_{HH}'s | Ent. | Var. |
| 66 | R | R | 0 | 1 |
| 67 | F | F, S, L, V, I, C, A, Y, M, G | 0.1 | 1 |
| 68 | T | T, A, S, I, F, V, P, N, G, R, K, M, D, L, W, Q | 0.34 | 4 |
| 69 | I | I, V, M, T, L, A, F, P, S, G, N | 0.5 | 5 |
| 70 | S | S, T, A, F, P, V, Y, L, D, G, N, H, W, E, C | 0.22 | 4 |
| 71 | R | R, S, K, G, T, I, W, A, N, V, E, L, M, F, D, Q, C | 0.61 | 7 |
| 72 | D, E | D, N, E, G, V, A, H, L, S, T, I, Q, F, P, Y, R | 0.34 | 4 |
| 73 | N, D, G | N, D, S, K, I, Y, G, T, H, R, A, V, F, L, E, M, P, C | 0.65 | 9 |
| 74 | A, S | A, T, V, S, F, G, D, P, N, I, R, L, Y, H, E, Q, K, W, M | 0.8 | 8 |
| 75 | K | K, N, E, R, Q, A, G, T, M, S, L, D, V, W, Y, I | 0.71 | 6 |
| 76 | N, S | N, K, S, R, D, T, H, G, E, A, Y, I, M, Q, L, W, P, F, V | 0.66 | 7 |
| 77 | S, T, I | T, A, M, S, R, I, V, L, P, E, N, K, G, W, Q | 0.72 | 7 |
| 78 | L, A | V, L, A, M, I, G, T, F, W, Q, S, E, N, H | 1.11 | 6 |
| 79 | Y, H | Y, F, D, S, H, N, T, A, L, W, V, C, G, E, I, P, R | 0.68 | 8 |
| 80 | L | L, M, V, P, F | 0.05 | 2 |
| 81 | Q | Q, E, R, H, L, D, T, G, K, P, A, I, S, N, Y, V, M | 0.38 | 4 |
| 82 | M | M, I, L, V, A, T, S, K | 0.12 | 3 |
| 82a | N, G | N, S, D, T, E, H, K, I, A, G, R, Y, L, V, F, Q | 0.77 | 5 |
| 82b | S | S, N, T, G, H, D, R, A, K, I, M, V, F, E, P, Y, C, L | 0.72 | 8 |
| 82c | L | L, V, M, P, A, T, G | 0.08 | 2 |
| 83 | Hallmark residue: R, K⁽⁵⁾, T, E⁽⁵⁾, Q, N, S, I, V, G, M, L, A, D, Y, H; | | 0.66 | 6 |
| | preferably K or R; most preferably K | | | |
| 84 | Hallmark residue: P⁽⁵⁾, S, H, L, A, V, I, T, F, D, R, Y, N, Q, G, E; | | 0.85 | 7 |
| | preferably P | | | |
| 85 | E, G | E, D, G, A, Q, V, S, N, K, T, R, L | 0.27 | 3 |
| 86 | D | D, E, G, N | 0.02 | 1 |
| 87 | T, M | T, S, A, M, R, P, K, E | 0.15 | 3 |
| 88 | A | A, G, S, D, N, T, P, V | 0.23 | 2 |
| 89 | V, L | V, I, L, E, A, R, T, D, F, M, N, S, K, G, Q, H | 0.71 | 7 |
| 90 | Y | Y, H, F, N | 0 | 1 |
| 91 | Y, H | Y, F, R, S, H, T, I, V, L, N, D, C, Q, W, A, E, M | 0.6 | 7 |
| 92 | C | C, R, P | 0 | 1 |
| 93 | A, K, T | A, N, T, K, G, V, R, Y, S, H, W, L, F, Q, M, I, E, C, D | 1.33 | 10 |
| 94 | K, R, T | A, K, V, T, R, L, G, S, D, Q, I, M, F, Y, N, E, H, P, C, W | 1.55 | 12 |

TABLE B-7
Non-limiting examples of amino acid residues in FR4
(for the footnotes, see the footnotes to Table B-2)

| | Amino acid residue(s): | | V_{HH} | V_{HH} |
|---|---|---|---|---|
| Pos. | Human V_{H}3 | Camelid V_{HH}'s | Ent. | Var. |
| 103 | Hallmark residue: W⁽⁴⁾, R⁽⁶⁾, G, S, K, A, M, Y, | | 0.54 | 6 |
| | L, F, T, N, V, Q, P⁽⁶⁾, E, C; preferably W | | | |
| 104 | Hallmark residue: G, A, S, T, D, P, N, E, C, L; | | 0.13 | 3 |
| | preferably G | | | |
| 105 | Q, R | Q, K, H, R, P, E, L, T, N, S, V, A, | 0.52 | 5 |
| | | M, G | | |
| 106 | G | G, R, E | 0 | 1 |
| 107 | T | T, Q, I, A, S, N, R, V, D | 0.24 | 3 |
| 108 | Hallmark residue: Q, L⁽⁷⁾, R, P, E, K, S, T, | | 0.3 | 4 |
| | M, A, H; preferably Q or L⁽⁷⁾ | | | |
| 109 | V | V, I, L | 0 | 1 |
| 110 | T | T, S, N, A, I, F | 0.01 | 1 |
| 111 | V | V, I, A | 0.01 | 1 |
| 112 | S | S, T, P, F, A | 0.01 | 1 |
| 113 | S | S, T, A, L, P, F, E, V | 0.04 | 1 |

[0919] Thus, in another preferred, but not limiting aspect, a Nanobody of the invention can be defined as an amino acid sequence with the (general) structure

FR1-CDR1-FR2-CDR2-FR3-CDR3-FR4

in which FR1 to FR4 refer to framework regions 1 to 4, respectively, and in which CDR1 to CDR3 refer to the complementarity determining regions 1 to 3, respectively, and in which:
[0920] i) one or more of the amino acid residues at positions 11, 37, 44, 45, 47, 83, 84, 103, 104 and 108 according to the Kabat numbering are chosen from the Hallmark residues mentioned in Table B-2;
   and in which:
[0921] ii) CDR1, CDR2 and CDR3 are as defined herein, and are preferably as defined according to one of the preferred aspects herein, and are more preferably as defined according to one of the more preferred aspects herein.

[0922] The above Nanobodies may for example be V_{HH} sequences or may be humanized Nanobodies. When the above Nanobody sequences are V_{HH} sequences, they may be suitably humanized, as further described herein. When the Nanobodies are partially humanized Nanobodies, they may optionally be further suitably humanized, again as described herein.

[0923] In particular, a Nanobody of the invention can be an amino acid sequence with the (general) structure

FR1CDR1-FR2-CDR2-FR3-CDR3-FR4

in which FR1 to FR4 refer to framework regions 1 to 4, respectively, and in which CDR1 to CDR3 refer to the complementarity determining regions 1 to 3, respectively, and in which:
[0924] i) (preferably) one or more of the amino acid residues at positions 11, 37, 44, 45, 47, 83, 84, 103, 104 and 108 according to the Kabat numbering are chosen from the Hallmark residues mentioned in Table B-2 (it being understood that V_{HH} sequences will contain one or more Hallmark residues; and that partially humanized Nanobodies will usually, and preferably, [still] contain one or more Hallmark residues [although it is also within the scope of the invention to provide—where suitable in accordance with the invention—partially humanized Nanobodies in which all Hallmark residues, but not one or more of the other amino acid residues, have been humanized]; and that in fully humanized Nanobodies, where suitable in accordance with the invention, all amino acid residues at the positions of the Hallmark residues will be amino acid residues that occur in a human V_{H}3 sequence. As will be clear to the skilled person based on the disclosure herein that such V_{HH} sequences, such partially humanized Nanobodies with at least one Hallmark residue, such partially humanized Nanobodies without Hallmark residues and such fully humanized Nanobodies all form aspects of this invention);
   and in which:
[0925] ii) said amino acid sequence has at least 80% amino acid identity with at least one of the amino acid sequences of SEQ ID NO's: 1 to 22, in which for the purposes of determining the degree of amino acid identity, the amino acid residues that form the CDR sequences (indicated with X in the sequences of SEQ ID NO's: 1 to 22) are disregarded;
   and in which:
[0926] iii) CDR1, CDR2 and CDR3 are as defined herein, and are preferably as defined according to one of the preferred aspects herein, and are more preferably as defined according to one of the more preferred aspects herein.

[0927] The above Nanobodies may for example be V_{HH} sequences or may be humanized Nanobodies. When the above Nanobody sequences are V_{HH} sequences, they may be suitably humanized, as further described herein. When the Nanobodies are partially humanized Nanobodies, they may optionally be further suitably humanized, again as described herein.

TABLE B-8

Representative amino acid sequences for Nanobodies of the KERE, GLEW and P, R, S 103 group.
The CDR's are indicated with XXXXX

| | | |
|---|---|---|
| KERE sequence no. 1 | SEQ ID NO: 1 | EVQLVESGGGLVQPGGSLRLSCAASGIPFSXXXXXWFRQAPGKQRDSVAXXXXXRFTISR |
| | | DNAKNTVYLQMNSLKPEDTAVYRCYFXXXXXWGQGTQVTVSS |
| KERE sequence no. 2 | SEQ ID NO: 2 | QVKLEESGGGLVQAGGSLRLSCVGSGRTFSXXXXXWFRLAPGKEREFVAXXXXXRFTISR |
| | | DTASNRGYLHMNNLTPEDTAVYYCAAXXXXXWGQGTQVTVSS |
| KERE sequence no. 3 | SEQ ID NO: 3 | AVQLVDSGGGLVQAGDSLKLSCALTGGAFTXXXXXWFRQTPGREREFVAXXXXXRFTIS |
| | | RDNAKNMVYLRMNSLIPEDAAVYSCAAXXXXXWGQGTLVTVSS |
| KERE sequence no. 4 | SEQ ID NO: 4 | QVQLVESGGGLVEAGGSLRLSCTASESPFRXXXXXWFRQTSGQEREFVAXXXXXRFTISR |
| | | DDAKNTVWLHGSTLKPEDTAVYYCAAXXXXXWGQGTQVTVSS |
| KERE sequence no. 5 | SEQ ID NO: 5 | AVQLVESGGGLVQGGGSLRLACAASERIFDXXXXXWYRQGPGNERELVAXXXXXRFTIS |
| | | MDYTKQTVYLHMNSLRPEDTGLYYCKIXXXXXWGQGTQVTVSS |
| KERE sequence no. 6 | SEQ ID NO: 6 | DVKFVESGGGLVQAGGSLRLSCVASGFNFDXXXXXWFRQAPGKEREEVAXXXXXRFTIS |
| | | SEKDKNSVYLQMNSLKPEDTALYICAGXXXXXWGRGTQVTVSS |
| KERE sequence no. 7 | SEQ ID NO: 7 | QVRLAESGGGLVQSGGSLRLSCVASGSTYTXXXXXWYRQYPGKQRALVAXXXXXRFTIA |
| | | RDSTKDTFCLQMNNLKPEDTAVYYCYAXXXXXWGQGTQVTVSS |
| KERE sequence no. 8 | SEQ ID NO: 8 | EVQLVESGGGLVQAGGSLRLSCAASGFTSDXXXXXWFRQAPGKPREGVSXXXXXRFTIST |
| | | DNAKNTVHLLMNRVNAEDTALYYCAVXXXXXWGRGTRVTVSS |
| KERE sequence no. 9 | SEQ ID NO: 9 | QVQLVESGGGLVQPGGSLRLSCQASGDISTXXXXXWYRQVPGKLREFVAXXXXXRFTISG |
| | | DNAKRAIYLQMNNLKPDDTAVYYCNRXXXXXWGQGTQVTVSP |
| KERE sequence no. 10 | SEQ ID NO: 10 | QVPVVESGGGLVQAGDSLRLFCAVPSFTSTXXXXXWFRQAPGKEREFVAXXXXXRFTISR |
| | | NATKNTLTLRMDSLKPEDTAVYYCAAXXXXXWGQGTQVTVSS |
| KERE sequence no. 11 | SEQ ID NO: 11 | EVQLVESGGGLVQAGDSLRLFCTVSGGTASXXXXXWFRQAPGEKREFVAXXXXXRFTIA |
| | | RENAGNMVYLQMNNLKPDDTALYTCAAXXXXXWGRGTQVTVSS |
| KERE sequence no. 12 | SEQ ID NO: 12 | AVQLVESGGDSVQPGDSQTLSCAASGRTNSXXXXXWFRQAPGKERVFLAXXXXXRFTIS |
| | | RDSAKNMMYLQMNNLKPQDTAVYYCAAXXXXXWGQGTQVTVSS |
| KERE sequence no. 13 | SEQ ID NO: 13 | AVQLVESGGGLVQAGGSLRLSCVVSGLTSSXXXXXWFRQTPWQERDFVAXXXXXRFTIS |
| | | RDNYKDTVLLEMNFLKPEDTAIYYCAAXXXXXWGQGTQVTVSS |
| KERE sequence no. 14 | SEQ ID NO: 14 | AVQLVESGGGLVQAGASLRLSCATSTRTLDXXXXXWFRQAPGRDREFVAXXXXXRFTVS |
| | | RDSAENTVALQMNSLKPEDTAVYYCAAXXXXXWGQGTRVTVSS |
| KERE sequence no. 15 | SEQ ID NO: 15 | QVQLVESGGGLVQPGGSLRLSCTVSRLTAHXXXXXWFRQAPGKEREAVSXXXXXRFTISR |
| | | DYAGNTAFLQMDSLKPEDTGVYYCATXXXXXWGQGTQVTVSS |
| KERE sequence no. 16 | SEQ ID NO: 16 | EVQLVESGGELVQAGGSLKLSCTASGRNFVXXXXXWFRRAPGKEREFVAXXXXXRFTVS |
| | | RDNGKNTAYLRMNSLKPEDTADYYCAVXXXXXLGSGTQVTVSS |
| GLEW sequence no. 1 | SEQ ID NO: 17 | AVQLVESGGGLVQPGGSLRLSCAASGFTFSXXXXXWVRQAPGKVLEWVSXXXXXRFTIS |
| | | RDNAKNTLYLQMNSLKPEDTAVYYCVKXXXXXGSQGTQVTVSS |
| GLEW sequence no. 2 | SEQ ID NO: 18 | EVQLVESGGGLVQPGGSLRLSCVCVSSGCTXXXXXWVRQAPGKAEEWVSXXXXXRFKIS |
| | | RDNAKKTLYLQMNSLGPEDTAMYYCQRXXXXXRGQGTQVTVSS |
| GLEW sequence no. 3 | SEQ ID NO: 19 | EVQLVESGGGLALPGGSLTLSCVFSGSTFSXXXXXWVRHTPGKAEEWVSXXXXXRFTISR |
| | | DNAKNTLYLEMNSLSPEDTAMYYCGRXXXXXRSKGIQVTVSS |
| P, R, S 103 | SEQ ID NO: 20 | AVQLVESGGGLVQAGGSLRLSCAASGRTFSXXXXXWFRQAPGKEREFVAXXXXXRFTISR |
| sequence no. 1 | | DNAKNTVYLQMNSLKPEDTAVYYCAAXXXXXRGQGTQVTVSS |
| P, R, S 103 | SEQ ID NO: 21 | DVQLVESGGDLVQPGGSLRLSCAASGFSFDXXXXXWLRQTPGKGLEWVGXXXXXRFTIS |
| sequence no. 2 | | RDNAKNMLYLHLNNLKSEDTAVYYCRRXXXXXLGQGTQVTVSS |
| P, R, S 103 | SEQ ID NO: 22 | EVQLVESGGGLVQPGGSLRLSCVCVSSGCTXXXXXWVRQAPGKAEEWVSXXXXXRFKIS |
| sequence no. 3 | | RDNAKKTLYLQMNSLGPEDTAMYYCQRXXXXXRGQGTQVTVSS |

[0928] in particular, a Nanobody of the invention of the KERE group can be an amino acid sequence with the (general) structure

FR1-CDR1-FR2-CDR2-FR3-CDR3-FR4

in which:
[0929] i) the amino acid residue at position 45 according to the Kabat numbering is a charged amino acid (as defined herein) or a cysteine residue, and position 44 is preferably an E;
   and in which:
[0930] ii) FR1 is an amino acid sequence that has at least 80% amino acid identity with at least one of the following amino acid sequences:

TABLE B-9
Representative FW1 sequences for Nanobodies of the KERE-group.

| | | |
|---|---|---|
| KERE FW1 sequence no. 1 | SEQ ID NO: 23 | QVQRVESGGGLVQAGGSLRLSCAASGRTSS |
| KERE FW1 sequence no. 2 | SEQ ID NO: 24 | QVQLVESGGGLVQTGDSLSLSCSASGRTFS |
| KERE FW1 sequence no. 3 | SEQ ID NO: 25 | QVKLEESGGGLVQAGDSLRLSCAATGRAFG |
| KERE FW1 sequence no. 4 | SEQ ID NO: 26 | AVQLVESGGGLVQPGESLGLSCVASGRDFV |
| KERE FW1 sequence no. 5 | SEQ ID NO: 27 | EVQLVESGGGLVQAGGSLRLSCEVLGRTAG |
| KERE FW1 sequence no. 6 | SEQ ID NO: 28 | QVQLVESGGGWVQPGGSLRLSCAASETILS |
| KERE FW1 sequence no. 7 | SEQ ID NO: 29 | QVQLVESGGGTVQPGGSLNLSCVASGNTFN |
| KERE FW1 sequence no. 8 | SEQ ID NO: 30 | EVQLVESGGGLAQPGGSLQLSCSAPGFTLD |
| KERE FW1 sequence no. 9 | SEQ ID NO: 31 | AQELEESGGGLVQAGGSLRLSCAASGRTFN |

and in which:
[0931] iii) FR2 is an amino acid sequence that has at least 80% amino acid identity with at least one of the following amino acid sequences:

TABLE B-10
Representative FW2 sequences
for Nanobodies of the KERE-group.

| | | |
|---|---|---|
| KERE FW2 sequence | SEQ ID NO: 41 | WFRQAPGKEREFVA |
| no. 1 | | |
| KERE FW2 sequence | SEQ ID NO: 42 | WFRQTPGREREFVA |
| no. 2 | | |
| KERE FW2 sequence | SEQ ID NO: 43 | WYRQAPGKQREMVA |
| no. 3 | | |
| KERE FW2 sequence | SEQ ID NO: 44 | WYRQGPGKQRELVA |
| no. 4 | | |
| KERE FW2 sequence | SEQ ID NO: 45 | WIRQAPGKEREGVS |
| no. 5 | | |
| KERE FW2 sequence | SEQ ID NO: 46 | WFREAPGKEREGIS |
| no. 6 | | |
| KERE FW2 sequence | SEQ ID NO: 47 | WYRQAPGKERDLVA |
| no. 7 | | |
| KERE FW2 sequence | SEQ ID NO: 48 | WFRQAPGKQREEVS |
| no. 8 | | |
| KERE FW2 sequence | SEQ ID NO: 49 | WFRQPPGKVREFVG |
| no. 9 | | |

and in which:
[0932] iv) FR3 is an amino acid sequence that has at least 80% amino acid identity with at least one of the following amino acid sequences:

TABLE B-11
Representative FW3 sequences for Nanobodies of the KERE-group.

| | | |
|---|---|---|
| KERE FW3 sequence no. 1 | SEQ ID NO: 50 | RFTISRDNAKNTVYLQMNSLKPEDTAVYRCYF |
| KERE FW3 sequence no. 2 | SEQ ID NO: 51 | RFAISRDNNKNTGYLQMNSLEPEDTAVYYCAA |
| KERE FW3 sequence no. 3 | SEQ ID NO: 52 | RFTVARNNAKNTVNLEMNSLKPEDTAVYYCAA |
| KERE FW3 sequence no. 4 | SEQ ID NO: 53 | RFTISRDIAKNTVDLLMNNLEPEDTAVYYCAA |
| KERE FW3 sequence no. 5 | SEQ ID NO: 54 | RLTISRDNAVDTMYLQMNSLKPEDTAVYYCAA |
| KERE FW3 sequence no. 6 | SEQ ID NO: 55 | RFTISRDNAKNTVYLQMDNVKPEDTAIYYCAA |
| KERE FW3 sequence no. 7 | SEQ ID NO: 56 | RFTISKDSGKNTVYLQMTSLKPEDTAVYYCAT |
| KERE FW3 sequence no. 8 | SEQ ID NO: 57 | RFTISRDSAKNMMYLQMNNLKPQDTAVYYCAA |
| KERE FW3 sequence no. 9 | SEQ ID NO: 58 | RFTISRENDKSTVYLQLNSLKPEDTAVYYCAA |
| KERE FW3 sequence no. 10 | SEQ ID NO: 59 | RFTISRDYAGNTAYLQMNSLKPEDTGVYYCAT |

and in which:
[0933] v) FR4 is an amino acid sequence that has at least 80% amino acid identity with at least one of the following amino acid sequences:

TABLE B-12
Representative FW4 sequences
for Nanobodies of the KERE-group.

| | | |
|---|---|---|
| KERE FW4 sequence no. 1 | SEQ ID NO: 60 | WGQGTQVTVSS |
| KERE FW4 sequence no. 2 | SEQ ID NO: 61 | WGKGTLVTVSS |
| KERE FW4 sequence no. 3 | SEQ ID NO: 62 | RGQGTRVTVSS |
| KERE FW4 sequence no. 4 | SEQ ID NO: 63 | WGLGTQVTISS |

and in which:
[0934] vi) CDR1, CDR2 and CDR3 are as defined herein, and are preferably as defined according to one of the preferred aspects herein, and are more preferably as defined according to one of the more preferred aspects herein.

[0935] In the above Nanobodies, one or more of the further Hallmark residues are preferably as described herein (for example, when they are V_{HH} sequences or partially humanized Nanobodies).

[0936] Also, the above Nanobodies may for example be V_{HH} sequences or may be humanized Nanobodies. When the above Nanobody sequences are V_{HH} sequences, they may be suitably humanized, as further described herein. When the Nanobodies are partially humanized Nanobodies, they may optionally be further suitably humanized, again as described herein.

[0937] With regard to framework 1, it will be clear to the skilled person that, when an amino acid sequence as outlined above is generated by expression of a nucleotide sequence, the first four amino acid sequences (i.e. amino acid residues 1-4 according to the Kabat numbering) may often be determined by the primer(s) that have been used to generate said nucleic acid. Thus, for determining the degree of amino acid identity, the first four amino acid residues are preferably disregarded.

[0938] Also, with regard to framework 1, and although amino acid positions 27 to 30 are according to the Kabat numbering considered to be part of the framework regions (and not the CDR's), it has been found by analysis of a database of more than 1000 V_{HH} sequences that the positions 27 to 30 have a variability (expressed in terms of V_{HH} entropy and V_{HH} variability—see Tables B-4 to B-7) that is much greater than the variability on positions 1 to 26. Because of this, for determining the degree of amino acid identity, the amino acid residues at positions 27 to 30 are preferably also disregarded.

[0939] In view of this, a Nanobody of the KERE class may be an amino acid sequence that is comprised of four framework regions/sequences interrupted by three complementarity determining regions/sequences, in which:
[0940] i) the amino acid residue at position 45 according to the Kabat numbering is a charged amino acid (as defined herein) or a cysteine residue, and position 44 is preferably an E;
   and in which:
[0941] ii) FR1 is an amino acid sequence that, on positions 5 to 26 of the Kabat numbering, has at least 80% amino acid identity with at least one of the following amino acid sequences:

TABLE B-13
Representative FWI sequences (amino acid residues 5 to 26)
for Nanobodies of the KERE-group.

| | | |
|---|---|---|
| KERE FW1 sequence no. 10 | SEQ ID NO: 32 | VESGGGLVQPGGSLRLSCAASG |
| KERE FW1 sequence no. 11 | SEQ ID NO: 33 | VDSGGGLVQAGDSLKLSCALTG |
| KERE FW1 sequence no. 12 | SEQ ID NO: 34 | VDSGGGLVQAGDSLRLSCAASG |
| KERE FW1 sequence no. 13 | SEQ ID NO: 35 | VDSGGGLVEAGGSLRLSCQVSE |
| KERE FW1 sequence no. 14 | SEQ ID NO: 36 | QDSGGGSVQAGGSLKLSCAASG |
| KERE FW1 sequence no. 15 | SEQ ID NO: 37 | VQSGGRLVQAGDSLRLSCAASE |
| KERE FW1 sequence no. 16 | SEQ ID NO: 38 | VESGGTLVQSGDSLKLSCASST |
| KERE FW1 sequence no. 17 | SEQ ID NO: 39 | MESGGDSVQSGGSLTLSCVASG |
| KERE FW1 sequence no. 18 | SEQ ID NO: 40 | QASGGGLVQAGGSLRLSCSASV |

and in which:
[0942] iii) FR2, FR3 and FR4 are as mentioned herein for FR2, FR3 and FR4 of Nanobodies of the KERE-class;
   and in which:
[0943] iv) CDR1, CDR2 and CDR3 are as defined herein, and are preferably as defined according to one of the preferred aspects herein, and are more preferably as defined according to one of the more preferred aspects herein.

[0944] The above Nanobodies may for example be V_{HH} sequences or may be humanized Nanobodies. When the above Nanobody sequences are V_{HH} sequences, they may be suitably humanized, as further described herein. When the Nanobodies are partially humanized Nanobodies, they may optionally be further suitably humanized, again as described herein.

[0945] A Nanobody of the GLEW class may be an amino acid sequence that is comprised of four framework regions/sequences interrupted by three complementarity determining regions/sequences, in which
[0946] i) preferably, when the Nanobody of the GLEW-class is a non-humanized Nanobody, the amino acid residue in position 108 is 0;
[0947] ii) FR1 is an amino acid sequence that has at least 80% amino acid identity with at least one of the following amino acid sequences:

TABLE B-14
Representative FW1 sequences for Nanobodies of the GLEW-group.

| | | |
|---|---|---|
| GLEW FW1 sequence no. 1 | SEQ ID NO: 64 | QVQLVESGGGLVQPGGSLRLSCAASGFTFS |
| GLEW FW1 sequence no. 2 | SEQ ID NO: 65 | EVHLVESGGGLVRPGGSLRLSCAAFGFIFK |
| GLEW FW1 sequence no. 3 | SEQ ID NO: 66 | QVKLEESGGGLAQPGGSLRLSCVASGFTFS |
| GLEW FW1 sequence no. 4 | SEQ ID NO: 67 | EVQLVESGGGLVQPGGSLRLSCVCVSSGCT |
| GLEW FW1 sequence no. 5 | SEQ ID NO: 68 | EVQLVESGGGLALPGGSLTLSCVFSGSTFS |

and in which:
[0948] iii) FR2 is an amino acid sequence that has at least 80% amino acid identity with at least one of the following amino acid sequences:

TABLE B-15
Representative FW2 sequences
for Nanobodies of the GLEW-group.

| | | |
|---|---|---|
| GLEW FW2 sequence | SEQ ID NO: 72 | WVRQAPGKVLEWVS |
| no. 1 | | |
| GLEW FW2 sequence | SEQ ID NO: 73 | WVRRPPGKGLEWVS |
| no. 2 | | |
| GLEW FW2 sequence | SEQ ID NO: 74 | WVRQAPGMGLEWVS |
| no. 3 | | |
| GLEW FW2 sequence | SEQ ID NO: 75 | WVRQAPGKEPEWVS |
| no. 4 | | |
| GLEW FW2 sequence | SEQ ID NO: 76 | WVRQAPGKDQEWVS |
| no. 5 | | |
| GLEW FW2 sequence | SEQ ID NO: 77 | WVRQAPGKAEEWVS |
| no. 6 | | |
| GLEW FW2 sequence | SEQ ID NO: 78 | WVRQAPGKGLEWVA |
| no. 7 | | |
| GLEW FW2 sequence | SEQ ID NO: 79 | WVRQAPGRATEWVS |
| no. 8 | | |

and in which:
[0949] iv) FR3 is an amino acid sequence that has at least 80% amino acid identity with at least one of the following amino acid sequences:

TABLE B-16
Representative FW3 sequences for Nanobodies of the GLEW-group.

| | | |
|---|---|---|
| GLEW FW3 sequence no. 1 | SEQ ID NQ: 80 | RFTISRDNAKNTLYLQMNSLKPEDTAVYYCVK |
| GLEW FW3 sequence no. 2 | SEQ ID NO: 81 | RFTISRDNARNTLYLQMDSLIPEDTALYYCAR |
| GLEW FW3 sequence no. 3 | SEQ ID NO: 82 | RFTSSRDNAKSTLYLQMNDLKPEDTALYYCAR |
| GLEW FW3 sequence no. 4 | SEQ ID NO: 83 | RFIISRDNAKNTLYLQMNSLGPEDTAMYYCQR |
| GLEW FW3 sequence no. 5 | SEQ ID NO: 84 | RFTASRDNAKNTLYLQMNSLKSEDTARYYCAR |
| GLEW FW3 sequence no. 6 | SEQ ID NO: 85 | RFTISRDNAKNTLYLQMDDLQSEDTAMYYCGR |

and in which:
[0950] v) FR4 is an amino acid sequence that has at least 80% amino acid identity with at least one of the following amino acid sequences:

TABLE B-17
Representative FW4 sequences
for Nanobodies of the GLEW-group.

| | | |
|---|---|---|
| GLEW FW4 sequence no. 1 | SEQ ID NO: 86 | GSQGTQVTVSS |
| GLEW FW4 sequence no. 2 | SEQ ID NO: 87 | LRGGTQVTVSS |
| GLEW FW4 sequence no. 3 | SEQ ID NO: 88 | RGQGTLVTVSS |
| GLEW FW4 sequence no. 4 | SEQ ID NO: 89 | RSRGIQVTVSS |
| GLEW FW4 sequence no. 5 | SEQ ID NO: 90 | WGKGTQVTVSS |
| GLEW FW4 sequence no. 6 | SEQ ID NO: 91 | WGQGTQVTVSS |

and in which:
[0951] vi) CDR1, CDR2 and CDR3 are as defined herein, and are preferably as defined according to one of the preferred aspects herein, and are more preferably as defined according to one of the more preferred aspects herein.

[0952] In the above Nanobodies, one or more of the further Hallmark residues are preferably as described herein (for example, when they are V_{HH} sequences or partially humanized Nanobodies).

[0953] With regard to framework 1, it will again be clear to the skilled person that, for determining the degree of amino acid identity, the amino acid residues on positions 1 to 4 and 27 to 30 are preferably disregarded.

[0954] In view of this, a Nanobody of the GLEW class may be an amino acid sequence that is comprised of four framework regions/sequences interrupted by three complementarity determining regions/sequences, in which:
[0955] i) preferably, when the Nanobody of the GLEW-class is a non-humanized Nanobody, the amino acid residue in position 108 is Q;
   and in which:
[0956] ii) FR1 is an amino acid sequence that, on positions 5 to 26 of the Kabat numbering, has at least 80% amino acid identity with at least one of the following amino acid sequences:

TABLE B-18
Representative FW1 sequences (amino acid residues
5 to 26) for Nanobodies of the KERE-group.

| | | |
|---|---|---|
| GLEW FW1 | SEQ ID NO: 69 | VESGGGLVQPGGSLRLSCAASG |
| sequence no. 6 | | |
| GLEW FW1 | SEQ ID NO: 70 | EESGGGLAQPGGSLRLSCVASG |
| sequence no. 7 | | |
| GLEW FW1 | SEQ ID NO: 71 | VESGGGLALPGGSLTLSCVFSG |
| sequence no. 8 | | |

and in which:
[0957] iii) FR2, FR3 and FR4 are as mentioned herein for FR2, FR3 and FR4 of Nanobodies of the GLEW-class; and in which:
[0958] iv) CDR1, CDR2 and CDR3 are as defined herein, and are preferably as defined according to one of the preferred aspects herein, and are more preferably as defined according to one of the more preferred aspects herein.

[0959] The above Nanobodies may for example be V_{HH} sequences or may be humanized Nanobodies. When the above Nanobody sequences are V_{HH} sequences, they may be suitably humanized, as further described herein. When the Nanobodies are partially humanized Nanobodies, they may optionally be further suitably humanized, again as described herein. In the above Nanobodies, one or more of the further Hallmark residues are preferably as described herein (for example, when they are V_{HH} sequences or partially humanized Nanobodies).

[0960] A Nanobody of the P, R, S 103 class may be an amino acid sequence that is comprised of four framework regions/sequences interrupted by three complementarity determining regions/sequences, in which
[0961] i) the amino acid residue at position 103 according to the Kabat numbering is different from W;
   and in which:
[0962] ii) preferably the amino acid residue at position 103 according to the Kabat numbering is P, R or S, and more preferably R;
   and in which:
[0963] iii) FR1 is an amino acid sequence that has at least 80% amino acid identity with at least one of the following amino acid sequences:

TABLE B-19
Representative FW1 sequences for Nanobodies of the P, R, S 103-group.

| | | |
|---|---|---|
| P, R, S 103 FW1 sequence no. 1 | SEQ ID NO: 92 | AVQLVESGGGLVQAGGSLRLSCAASGRTFS |
| P, R, S 103 FW1 sequence no. 2 | SEQ ID NO: 93 | QVQLQESGGGMVQPGGSLRLSCAASGFDFG |
| P, R, S 103 FW1 sequence no. 3 | SEQ ID NO: 94 | EVHLVESGGGLVRPGGSLRLSCAAFGFIFK |
| P, R, S 103 FW1 sequence no. 4 | SEQ ID NO: 95 | QVQLAESGGGLVQPGGSLKLSCAASRTIVS |
| P, R, S 103 FW1 sequence no. 5 | SEQ ID NO: 96 | QEHLVESGGGLVDIGGSLRLSCAASERIFS |
| P, R, S 103 FW1 sequence no. 6 | SEQ ID NO: 97 | QVKLEESGGGLAQPGGSLRLSCVASGFTFS |
| P, R, S 103 FW1 sequence no. 7 | SEQ ID NO: 98 | EVQLVESGGGLVQPGGSLRLSCVCVSSGCT |
| P, R, S 103 FW1 sequence no. 8 | SEQ ID NO: 99 | EVQLVESGGGLALPGGSLTLSCVFSGSTFS |

and in which
[0964] iv) FR2 is an amino acid sequence that has at least 80% amino acid identity with at least one of the following amino acid sequences:

TABLE B-20
Representative FW2 sequences
for Nanobodies of the P, R, S 103-group.

| | | |
|---|---|---|
| P, R, S 103 FW2 sequence no. 1 | SEQ ID NO: 102 | WFRQAPGKEREFVA |
| P, R, S 103 FW2 sequence no. 2 | SEQ ID NO: 103 | WVRQAPGKVLEWVS |
| P, R, S 103 FW2 sequence no. 3 | SEQ ID NO: 104 | WVRRPPGKGLEWVS |
| P, R, S 103 FW2 sequence no. 4 | SEQ ID NO: 105 | WIRQAPGKEREGVS |
| P, R, S 103 FW2 sequence no. 5 | SEQ ID NO: 106 | WVRQYPGKEPEWVS |
| P, R, S 103 FW2 sequence no. 6 | SEQ ID NO: 107 | WFRQPPGKEHEFVA |
| P, R, S 103 FW2 sequence no. 7 | SEQ ID NO: 108 | WYRQAPGKRTELVA |
| P, R, S 103 FW2 sequence no. 8 | SEQ ID NO: 109 | WLRQAPGQGLEWVS |
| P, R, S 103 FW2 sequence no. 9 | SEQ ID NO: 110 | WLRQTPGKGLEWVG |
| P, R, S 103 FW2 sequence no. 10 | SEQ ID NO: 111 | WVRQAPGKAEEFVS |

and in which:
[0965] v) FR3 is an amino acid sequence that has at least 80% amino acid identity with at least one of the following amino acid sequences:

TABLE B-21
Representative FW3 sequences for Nanobodies of the P, R, S 103-group.

| | | |
|---|---|---|
| P, R, S 103 FW3 sequence no. 1 | SEQ ID NO: 112 | RFTISRDNAKNTVYLQMNSLKPEDTAVYYCAA |
| P, R, S 103 FW3 sequence no. 2 | SEQ ID NO: 113 | RFTISRDNARNTLYLQMDSLIPEDTALYYCAR |
| P, R, S 103 FW3 sequence no. 3 | SEQ ID NO: 114 | RFTISRDNAKNEMYLQMNNLKTEDTGVYWCGA |
| P, R, S 103 FW3 sequence no. 4 | SEQ ID NO: 115 | RFTISSDSNRNMIYLQMNNLKPEDTAVYYCAA |
| P, R, S 103 FW3 sequence no. 5 | SEQ ID NO: 116 | RFTISRDNAKNMLYLHLNNLKSEDTAVYYCRR |
| P, R, S 103 FW3 sequence no. 6 | SEQ ID NO: 117 | RFTISRDNAKKTVYLRLNSLNPEDTAVYSCNL |
| P, R, S 103 FW3 sequence no. 7 | SEQ ID NO: 118 | RFKISRDNAKKTLYLQMNSLGPEDTAMYYCQR |
| P, R, S 103 FW3 sequence no. 8 | SEQ ID NO: 119 | RFTVSRDNGKNTAYLRMNSLKPEDTADYYCAV |

and in which:
[0966] vi) FR4 is an amino acid sequence that has at least 80% amino acid identity with at least one of the following amino acid sequences:

TABLE B-22
Representative FW4 sequences for
Nanobodies of the P, R, S 103-group.

| | | |
|---|---|---|
| P, R, S 103 FW4 | SEQ ID NO: 120 | RGQGTQVTVSS |
| sequence no. 1 | | |
| P, R, S 103 FW4 | SEQ ID NO: 121 | LRGGTQVTVSS |
| sequence no. 2 | | |
| P, R, S 103 FW4 | SEQ ID NO: 122 | GNKGTLVTVSS |
| sequence no. 3 | | |
| P, R, S 103 FW4 | SEQ ID NO: 123 | SSPGTQVTVSS |
| sequence no. 4 | | |
| P, R, S 103 FW4 | SEQ ID NO: 124 | SSQGTLVTVSS |
| sequence no. 5 | | |
| P, R, S 103 FW4 | SEQ ID NO: 125 | RSRGIQVTVSS |
| sequence no. 6 | | |

and in which:
[0967] vii) CDR1, CDR2 and CDR3 are as defined herein, and are preferably as defined according to one of the preferred aspects herein, and are more preferably as defined according to one of the more preferred aspects herein.

[0968] In the above Nanobodies, one or more of the further Hallmark residues are preferably as described herein (for example, when they are V_{HH} sequences or partially humanized Nanobodies).

[0969] With regard to framework 1, it will again be clear to the skilled person that, for determining the degree of amino acid identity, the amino acid residues on positions 1 to 4 and 27 to 30 are preferably disregarded.

[0970] In view of this, a Nanobody of the P, R, S 103 class may be an amino acid sequence that is comprised of four framework regions/sequences interrupted by three complementarity determining regions/sequences, in which:
[0971] i) the amino acid residue at position 103 according to the Kabat numbering is different from W;
   and in which:
[0972] ii) preferably the amino acid residue at position 103 according to the Kabat numbering is P, R or 5, and more preferably R;
   and in which:
[0973] iii) FR1 is an amino acid sequence that, on positions 5 to 26 of the Kabat numbering, has at least 80% amino acid identity with at least one of the following amino acid sequences:

TABLE B-23
Representative FW1 sequences (amino acid residues
5 to 26) for Nanobodies of the P, R, S 103-group.

| | | |
|---|---|---|
| P, R, S 103 FW1 | SEQ ID | VESGGGLVQAGGSLRLSCAASG |
| sequence no. 9 | NO: 100 | |
| P, R, S 103 FW1 | SEQ ID | AESGGGLVQPGGSLKLSCAASR |
| sequence no. 10 | NO: 101 | |

and in which:
[0974] iv) FR2, FR3 and FR4 are as mentioned herein for FR2, FR3 and FR4 of Nanobodies of the P, R, S 103 class;
   and in which:
[0975] v) CDR1, CDR2 and CDR3 are as defined herein, and are preferably as defined according to one of the preferred aspects herein, and are more preferably as defined according to one of the more preferred aspects herein.

[0976] The above Nanobodies may for example be V_{HH} sequences or may be humanized Nanobodies. When the above Nanobody sequences are V_{HH} sequences, they may be suitably humanized, as further described herein. When the Nanobodies are partially humanized Nanobodies, they may optionally be further suitably humanized, again as described herein.

[0977] In the above Nanobodies, one or more of the further Hallmark residues are preferably as described herein (for example, when they are V_{HH} sequences or partially humanized Nanobodies).

[0978] In another preferred, but non-limiting aspect, the invention relates to a Nanobody as described above, in which the CDR sequences have at least 70% amino acid identity, preferably at least 80% amino acid identity, more preferably at least 90% amino acid identity, such as 95% amino acid identity or more or even essentially 100% amino acid identity with the CDR sequences of at least one of the amino acid sequences of SEQ ID NO's: 132-216 (see Table A-3). This degree of amino acid identity can for example be determined by determining the degree of amino acid identity (in a manner described herein) between said Nanobody and one or more of the sequences of SEQ ID NO's: 132-216 (see Table A-1), in which the amino acid residues that form the framework regions are disregarded. Such Nanobodies can be as further described herein.

[0979] As already mentioned herein, another preferred but non-limiting aspect of the invention relates to a Nanobody with an amino acid sequence that is chosen from the group consisting of SEQ ID NO's: 132-216 (see Table A-1) or from the group consisting of from amino acid sequences that have more than 80%, preferably more than 90%, more preferably more than 95%, such as 99% or more sequence identity (as defined herein) with at least one of the amino acid sequences of SEQ ID NO's: 132-216 (see Table A-1).

[0980] Also, in the above Nanobodies:
[0981] i) any amino acid substitution (when it is not a humanizing substitution as defined herein) is preferably, and compared to the corresponding amino acid sequence of SEQ ID NO's: 132-216 (see Table A-3), a conservative amino acid substitution, (as defined herein);
   and/or:
[0982] ii) its amino acid sequence preferably contains either only amino acid substitutions, or otherwise preferably no more than 5, preferably no more than 3, and more preferably only 1 or 2 amino acid deletions or insertions, compared to the corresponding amino acid sequence of SEQ ID NO's: 132-216 (see Table A-3);
   and/or
[0983] iii) the CDR's may be CDR's that are derived by means of affinity maturation, for example starting from the CDR's of to the corresponding amino acid sequence of SEQ ID NO's: 132-216 (see Table A-3).

[0984] Preferably, the CDR sequences and FR sequences in the Nanobodies of the invention are such that the Nanobodies of the invention (and polypeptides of the invention comprising the same):
[0985] bind to IL-6R with a dissociation constant (K_{D}) of 10⁻⁵ to 10⁻¹² moles/liter or less, and preferably 10⁻⁷ to 10⁻¹² moles/liter or less and more preferably 10⁻⁸ to 10⁻¹² moles/liter (i.e. with an association constant (K_{A}) of 10⁵ to 10¹² liter/moles or more, and preferably 10⁷ to 10¹² liter/moles or more and more preferably 10⁸ to 10¹² liter/moles);
   and/or such that they:
[0986] bind to IL-6R with a kₒₙ-rate of between 10² M⁻¹s⁻¹ to about 10⁷M⁻¹s⁻¹, preferably between 10³ M⁻¹s⁻¹ and 10⁷ M⁻¹s⁻¹, more preferably between 10⁴ M⁻¹s⁻¹ and 10⁷ M⁻¹s⁻¹, such as between 10⁵ M⁻¹s⁻¹ and 10⁷ M⁻¹s⁻¹;
   and/or such that they:
[0987] bind to IL-6R with a k_{off} rate between 1 s⁻¹ (t_{1/2}=0.69 s) and 10⁻⁶ s⁻¹ (providing a near irreversible complex with a t_{1/2} of multiple days), preferably between 10⁻² s⁻¹ and 10⁻⁶ s⁻¹, more preferably between 10⁻³ s⁻¹ and 10⁻⁶ s⁻¹, such as between 10⁻⁴s⁻¹ and 10⁻⁶ s⁻¹.

[0988] Preferably, CDR sequences and FR sequences present in the Nanobodies of the invention are such that the Nanobodies of the invention will bind to IL-6R with an affinity less than 500 nM, preferably less than 200 nM, more preferably less than 10 nM, such as less than 500 μM.

[0989] According to one non-limiting aspect of the invention, a Nanobody may be as defined herein, but with the proviso that it has at least “one amino acid difference” (as defined herein) in at least one of the framework regions compared to the corresponding framework region of a naturally occurring human V_{H} domain, and in particular compared to the corresponding framework region of DP-47. More specifically, according to one non-limiting aspect of the invention, a Nanobody may be as defined herein, but with the proviso that it has at least “one amino acid difference” (as defined herein) at least one of the Hallmark residues (including those at positions 108, 103 and/or 45) compared to the corresponding framework region of a naturally occurring human V_{H} domain, and in particular compared to the corresponding framework region of DP-47. Usually, a Nanobody will have at least one such amino acid difference with a naturally occurring V_{H} domain in at least one of FR2 and/or FR4, and in particular at least one of the Hallmark residues in FR2 and/or FR4 (again, including those at positions 108, 103 and/or 45).

[0990] Also, a humanized Nanobody of the invention may be as defined herein, but with the proviso that it has at least “one amino acid difference” (as defined herein) in at least one of the framework regions compared to the corresponding framework region of a naturally occurring V_{HH} domain. More specifically, according to one non-limiting aspect of the invention, a humanized Nanobody may be as defined herein, but with the proviso that it has at least “one amino acid difference” (as defined herein) at least one of the Hallmark residues (including those at positions 108, 103 and/or 45) compared to the corresponding framework region of a naturally occurring V_{HH} domain. Usually, a humanized Nanobody will have at least one such amino acid difference with a naturally occurring V_{HH} domain in at least one of FR2 and/or FR4, and in particular at least one of the Hallmark residues in FR2 and/or FR4 (again, including those at positions 108, 103 and/or 45).

[0991] As will be clear from the disclosure herein, it is also within the scope of the invention to use natural or synthetic analogs, mutants, variants, alleles, homologs and orthologs (herein collectively referred to as “analogs”) of the Nanobodies of the invention as defined herein, and in particular analogs of the Nanobodies of SEQ ID NO's: 132-216 (see Table A-3). Thus, according to one aspect of the invention, the term “Nanobody of the invention” in its broadest sense also covers such analogs.

[0992] Generally, in such analogs, one or more amino acid residues may have been replaced, deleted and/or added, compared to the Nanobodies of the invention as defined herein. Such substitutions, insertions or deletions may be made in one or more of the framework regions and/or in one or more of the CDR's. When such substitutions, insertions or deletions are made in one or more of the framework regions, they may be made at one or more of the Hallmark residues and/or at one or more of the other positions in the framework residues, although substitutions, insertions or deletions at the Hallmark residues are generally less preferred (unless these are suitable humanizing substitutions as described herein).

[0993] By means of non-limiting examples, a substitution may for example be a conservative substitution (as described herein) and/or an amino acid residue may be replaced by another amino acid residue that naturally occurs at the same position in another V_{HH} domain (see Tables B-4 to B-7 for some non-limiting examples of such substitutions), although the invention is generally not limited thereto. Thus, any one or more substitutions, deletions or insertions, or any combination thereof, that either improve the properties of the Nanobody of the invention or that at least do not detract too much from the desired properties or from the balance or combination of desired properties of the Nanobody of the invention (i.e. to the extent that the Nanobody is no longer suited for its intended use) are included within the scope of the invention. A skilled person will generally be able to determine and select suitable substitutions, deletions or insertions, or suitable combinations of thereof, based on the disclosure herein and optionally after a limited degree of routine experimentation, which may for example involve introducing a limited number of possible substitutions and determining their influence on the properties of the Nanobodies thus obtained.

[0994] For example, and depending on the host organism used to express the Nanobody or polypeptide of the invention, such deletions and/or substitutions may be designed in such a way that one or more sites for post-translational modification (such as one or more glycosylation sites) are removed, as will be within the ability of the person skilled in the art. Alternatively, substitutions or insertions may be designed so as to introduce one or more sites for attachment of functional groups (as described herein), for example to allow site-specific pegylation (again as described herein).

[0995] As can be seen from the data on the V_{HH} entropy and V_{HH} variability given in Tables 8-4 to B-7 above, some amino acid residues in the framework regions are more conserved than others. Generally, although the invention in its broadest sense is not limited thereto, any substitutions, deletions or insertions are preferably made at positions that are less conserved. Also, generally, amino acid substitutions are preferred over amino acid deletions or insertions.

[0996] The analogs are preferably such that they can bind to IL-6R with an affinity (suitably measured and/or expressed as a K_{D}-value (actual or apparent), a K_{A}-value (actual or apparent), a kₒₙ-rate and/or a k_{off}-rate, or alternatively as an IC₅₀ value, as further described herein) that is as defined herein for the Nanobodies of the invention.

[0997] The analogs are preferably also such that they retain the favourable properties the Nanobodies, as described herein.

[0998] Also, according to one preferred aspect, the analogs have a degree of sequence identity of at least 70%, preferably at least 80%, more preferably at least 90%, such as at least 95% or 99% or more; and/or preferably have at most 20, preferably at most 10, even more preferably at most 5, such as 4, 3, 2 or only 1 amino acid difference (as defined herein), with one of the Nanobodies of SEQ ID NOs: 132-216 (see Table A-3).

[0999] Also, the framework sequences and CDR's of the analogs are preferably such that they are in accordance with the preferred aspects defined herein. More generally, as described herein, the analogs will have (a) a Q at position 108; and/or (b) a charged amino acid or a cysteine residue at position 45 and preferably an E at position 44, and more preferably E at position 44 and R at position 45; and/or (c) P, R or S at position 103.

[1000] One preferred class of analogs of the Nanobodies of the invention comprise Nanobodies that have been humanized (i.e. compared to the sequence of a naturally occurring Nanobody of the invention). As mentioned in the background art cited herein, such humanization generally involves replacing one or more amino acid residues in the sequence of a naturally occurring V_{HH} with the amino acid residues that occur at the same position in a human V_{H} domain, such as a human V_{H}3 domain. Examples of possible humanizing substitutions or combinations of humanizing substitutions will be clear to the skilled person, for example from the Tables herein, from the possible humanizing substitutions mentioned in the background art cited herein, and/or from a comparison between the sequence of a Nanobody and the sequence of a naturally occurring human V_{H} domain.

[1001] The humanizing substitutions should be chosen such that the resulting humanized Nanobodies still retain the favourable properties of Nanobodies as defined herein, and more preferably such that they are as described for analogs in the preceding paragraphs. A skilled person will generally be able to determine and select suitable humanizing substitutions or suitable combinations of humanizing substitutions, based on the disclosure herein and optionally after a limited degree of routine experimentation, which may for example involve introducing a limited number of possible humanizing substitutions and determining their influence on the properties of the Nanobodies thus obtained.

[1002] Generally, as a result of humanization, the Nanobodies of the invention may become more “human-like”, while still retaining the favorable properties of the Nanobodies of the invention as described herein. As a result, such humanized Nanobodies may have several advantages, such as a reduced immunogenicity, compared to the corresponding naturally occurring V_{HH} domains. Again, based on the disclosure herein and optionally after a limited degree of routine experimentation, the skilled person will be able to select humanizing substitutions or suitable combinations of humanizing substitutions which optimize or achieve a desired or suitable balance between the favourable properties provided by the humanizing substitutions on the one hand and the favourable properties of naturally occurring V_{HH} domains on the other hand.

[1003] The Nanobodies of the invention may be suitably humanized at any framework residue(s), such as at one or more Hallmark residues (as defined herein) or at one or more other framework residues (i.e. non-Hallmark residues) or any suitable combination thereof. One preferred humanizing substitution for Nanobodies of the “P, R, S-103 group” or the “KERE group” is 0108 into L108. Nanobodies of the “GLEW class” may also be humanized by a 0108 into L108 substitution, provided at least one of the other Hallmark residues contains a camelid (camelizing) substitution (as defined herein). For example, as mentioned above, one particularly preferred class of humanized Nanobodies has GLEW or a GLEW-like sequence at positions 44-47; P, R or S (and in particular R) at position 103, and an L at position 108.

[1004] The humanized and other analogs, and nucleic acid sequences encoding the same, can be provided in any manner known per se, for example using one or more of the techniques mentioned on pages 103 and 104 of WO 08/020,079.

[1005] As mentioned there, it will be also be clear to the skilled person that the Nanobodies of the invention (including their analogs) can be designed and/or prepared starting from human V_{H} sequences (i.e. amino acid sequences or the corresponding nucleotide sequences), such as for example from human V_{H}3 sequences such as DP-47, DP-51 or DP-29, i.e. by introducing one or more camelizing substitutions (i.e. changing one or more amino acid residues in the amino acid sequence of said human V_{H} domain into the amino acid residues that occur at the corresponding position in a V_{HH} domain), so as to provide the sequence of a Nanobody of the invention and/or so as to confer the favourable properties of a Nanobody to the sequence thus obtained. Again, this can generally be performed using the various methods and techniques referred to in the previous paragraph, using an amino acid sequence and/or nucleotide sequence for a human V_{H} domain as a starting point.

[1006] Some preferred, but non-limiting camelizing substitutions can be derived from Tables B-4-B-7. It will also be clear that camelizing substitutions at one or more of the Hallmark residues will generally have a greater influence on the desired properties than substitutions at one or more of the other amino acid positions, although both and any suitable combination thereof are included within the scope of the invention. For example, it is possible to introduce one or more camelizing substitutions that already confer at least some the desired properties, and then to introduce further camelizing substitutions that either further improve said properties and/or confer additional favourable properties. Again, the skilled person will generally be able to determine and select suitable camelizing substitutions or suitable combinations of camelizing substitutions, based on the disclosure herein and optionally after a limited degree of routine experimentation, which may for example involve introducing a limited number of possible camelizing substitutions and determining whether the favourable properties of Nanobodies are obtained or improved (i.e. compared to the original V_{H} domain).

[1007] Generally, however, such camelizing substitutions are preferably such that the resulting an amino acid sequence at least contains (a) a Q at position 108; and/or (b) a charged amino acid or a cysteine residue at position 45 and preferably also an E at position 44, and more preferably E at position 44 and Rat position 45; and/or (c) P, R or S at position 103; and optionally one or more further camelizing substitutions. More preferably, the camelizing substitutions are such that they result in a Nanobody of the invention and/or in an analog thereof (as defined herein), such as in a humanized analog and/or preferably in an analog that is as defined in the preceding paragraphs.

[1008] Nanobodies can also be derived from V_{H} domains by the incorporation of substitutions that are rare in nature, but nonetheless, structurally compatible with the VH domain fold. For example, but without being limiting, these substitutions may include on or more of the following: Gly at position 35, Ser, Val or Thr at position 37, Ser, Thr, Arg, Lys, H is, Asp or Glu at position 39, Glu or H is at position 45, Trp, Leu, Val, Ala, Thr, or Glu at position 47, S or R at position 50. (Barthelemy et al. J Bid Chem. 2008 Feb. 8; 283(6):3639-54. Epub 2007 Nov. 28)

[1009] As will also be clear from the disclosure herein, it is also within the scope of the invention to use parts or fragments, or combinations of two or more parts or fragments, of the Nanobodies of the invention as defined herein, and in particular parts or fragments of the Nanobodies of SEQ ID NO's: 132-216 (see Table A-3). Thus, according to one aspect of the invention, the term “Nanobody of the invention” in its broadest sense also covers such parts or fragments.

[1010] Generally, such parts or fragments of the Nanobodies of the invention (including analogs thereof) have amino acid sequences in which, compared to the amino acid sequence of the corresponding full length Nanobody of the invention (or analog thereof), one or more of the amino acid residues at the N-terminal end, one or more amino acid residues at the C-terminal end, one or more contiguous internal amino acid residues, or any combination thereof, have been deleted and/or removed.

[1011] The parts or fragments are preferably such that they can bind to IL-6R with an affinity (suitably measured and/or expressed as a K_{D}-value (actual or apparent), a K_{A}-value (actual or apparent), a kₒₙ-rate and/or a k_{off}-rate, or alternatively as an IC₅₀ value, as further described herein) that is as defined herein for the Nanobodies of the invention.

[1012] Any part or fragment is preferably such that it comprises at least 10 contiguous amino acid residues, preferably at least 20 contiguous amino acid residues, more preferably at least 30 contiguous amino acid residues, such as at least 40 contiguous amino acid residues, of the amino acid sequence of the corresponding full length Nanobody of the invention.

[1013] Also, any part or fragment is such preferably that it comprises at least one of CDR1, CDR2 and/or CDR3 or at least part thereof (and in particular at least CDR3 or at least part thereof). More preferably, any part or fragment is such that it comprises at least one of the CDR's (and preferably at least CDR3 or part thereof) and at least one other CDR (i.e. CDR1 or CDR2) or at least part thereof, preferably connected by suitable framework sequence(s) or at least part thereof. More preferably, any part or fragment is such that it comprises at least one of the CDR's (and preferably at least CDR3 or part thereof) and at least part of the two remaining CDR's, again preferably connected by suitable framework sequence(s) or at least part thereof.

[1014] According to another particularly preferred, but non-limiting aspect, such a part or fragment comprises at least CDR3, such as FR3, CDR3 and FR4 of the corresponding full length Nanobody of the invention, i.e. as for example described in the International application WO 03/050531 (Lasters et al.).

[1015] As already mentioned above, it is also possible to combine two or more of such parts or fragments (i.e. from the same or different Nanobodies of the invention), i.e. to provide an analog (as defined herein) and/or to provide further parts or fragments (as defined herein) of a Nanobody of the invention. It is for example also possible to combine one or more parts or fragments of a Nanobody of the invention with one or more parts or fragments of a human V_{H} domain.

[1016] According to one preferred aspect, the parts or fragments have a degree of sequence identity of at least 50%, preferably at least 60%, more preferably at least 70%, even more preferably at least 80%, such as at least 90%, 95% or 99% or more with one of the Nanobodies of SEQ ID NOs 132-216 (see Table A-3).

[1017] The parts and fragments, and nucleic acid sequences encoding the same, can be provided and optionally combined in any manner known per se. For example, such parts or fragments can be obtained by inserting a stop codon in a nucleic acid that encodes a full-sized Nanobody of the invention, and then expressing the nucleic acid thus obtained in a manner known per se (e.g. as described herein). Alternatively, nucleic acids encoding such parts or fragments can be obtained by suitably restricting a nucleic acid that encodes a full-sized Nanobody of the invention or by synthesizing such a nucleic acid in a manner known per se. Parts or fragments may also be provided using techniques for peptide synthesis known per se.

[1018] The invention in its broadest sense also comprises derivatives of the biparatopic (or multiparatopic polypeptides and/or Nanobodies of the invention. Such derivatives can generally be obtained by modification, and in particular by chemical and/or biological (e.g. enzymatical) modification, of the biparatopic (or multiparatopic) polypeptides and/or Nanobodies of the invention and/or of one or more of the amino acid residues that form the biparatopic (or multiparatopic) polypeptides and/or Nanobodies of the invention.

[1019] Examples of such modifications, as well as examples of amino acid residues within the biparatopic (or multiparatopic) polypeptide and/or Nanobody sequence that can be modified in such a manner (i.e. either on the protein backbone but preferably on a side chain), methods and techniques that can be used to introduce such modifications and the potential uses and advantages of such modifications will be clear to the skilled person.

[1020] For example, such a modification may involve the introduction (e.g. by covalent linking or in an other suitable manner) of one or more functional groups, residues or moieties into or onto the biparatopic (or multiparatopic) polypeptide and/or Nanobody of the invention, and in particular of one or more functional groups, residues or moieties that confer one or more desired properties or functionalities to the biparatopic (or multiparatopic) polypeptide and/or Nanobody of the invention. Example of such functional groups will be clear to the skilled person.

[1021] For example, such modification may comprise the introduction (e.g. by covalent binding or in any other suitable manner) of one or more functional groups that increase the half-life, the solubility and/or the absorption of the biparatopic (or multiparatopic) polypeptide and/or Nanobody of the invention, that reduce the immunogenicity and/or the toxicity of the biparatopic (or multiparatopic polypeptide and/or Nanobody of the invention, that eliminate or attenuate any undesirable side effects of the biparatopic (or multiparatopic) polypeptide and/or Nanobody of the invention, and/or that confer other advantageous properties to and/or reduce the undesired properties of the biparatopic (or multiparatopic) polypeptides and/or Nanobodies and/or polypeptides of the invention; or any combination of two or more of the foregoing. Examples of such functional groups and of techniques for introducing them will be clear to the skilled person, and can generally comprise all functional groups and techniques mentioned in the general background art cited hereinabove as well as the functional groups and techniques known per se for the modification of pharmaceutical proteins, and in particular for the modification of antibodies or antibody fragments (including ScFv's and single domain antibodies), for which reference is for example made to Remington's Pharmaceutical Sciences, 16th ed., Mack Publishing Co., Easton, Pa. (1980). Such functional groups may for example be linked directly (for example covalently) to a biparatopic (or multiparatopic) polypeptide and/or Nanobody of the invention, or optionally via a suitable linker or spacer, as will again be clear to the skilled person.

[1022] One of the most widely used techniques for increasing the half-life and/or reducing the immunogenicity of pharmaceutical proteins comprises attachment of a suitable pharmacologically acceptable polymer, such as polyethyleneglycol) (PEG) or derivatives thereof (such as methoxypoly(ethyleneglycol) or mPEG). Generally, any suitable form of pegylation can be used, such as the pegylation used in the art for antibodies and antibody fragments (including but not limited to (single) domain antibodies and ScFv's); reference is made to for example Chapman, Nat. Biotechnol., 54, 531-545 (2002); by Veronese and Harris, Adv. Drug Deliv. Rev. 54, 453-456 (2003), by Harris and Chess, Nat. Rev. Drug. Discov., 2, (2003) and in WO 04/060965. Various reagents for pegylation of proteins are also commercially available, for example from Nektar Therapeutics, USA.

[1023] Preferably, site-directed pegylation is used, in particular via a cysteine-residue (see for example Yang et al., Protein Engineering, 16, 10, 761-770 (2003). For example, for this purpose, PEG may be attached to a cysteine residue that naturally occurs in a biparatopic (or multiparatopic) polypeptide and/or Nanobody of the invention, a biparatopic (or multiparatopic) polypeptide and/or Nanobody of the invention may be modified so as to suitably introduce one or more cysteine residues for attachment of PEG, or an amino acid sequence comprising one or more cysteine residues for attachment of PEG may be fused to the N- and/or C-terminus of a biparatopic (or multiparatopic polypeptide and/or Nanobody of the invention, all using techniques of protein engineering known per se to the skilled person.

[1024] Preferably, for the biparatopic (or multiparatopic) polypeptide, Nanobodies and proteins of the invention, a PEG is used with a molecular weight of more than 5000, such as more than 10,000 and less than 200,000, such as less than 100,000; for example in the range of 20,000-80,000.

[1025] Another, usually less preferred modification comprises N-linked or O-linked glycosylation, usually as part of co-translational and/or post-translational modification, depending on the host cell used for expressing the biparatopic (or multiparatopic) polypeptide and/or Nanobody of the invention.

[1026] Yet another modification may comprise the introduction of one or more detectable labels or other signal-generating groups or moieties, depending on the intended use of the labelled Nanobody. Suitable labels and techniques for attaching, using and detecting them will be clear to the skilled person, and for example include, but are not limited to, the fluorescent labels, phosphorescent labels, chemiluminescent labels, bioluminescent labels, radio-isotopes, metals, metal chelates, metallic cations, chromophores and enzymes, such as those mentioned on page 109 of WO 08/020,079. Other suitable labels will be clear to the skilled person, and for example include moieties that can be detected using NMR or ESR spectroscopy.

[1027] Such labelled biparatopic (or multiparatopic) polypeptides and/or Nanobodies of the invention may for example be used for in vitro, in vivo or in situ assays (including immunoassays known per se such as ELISA, RIA, EIA and other “sandwich assays”, etc.) as well as in vivo diagnostic and imaging purposes, depending on the choice of the specific label.

[1028] As will be clear to the skilled person, another modification may involve the introduction of a chelating group, for example to chelate one of the metals or metallic cations referred to above. Suitable chelating groups for example include, without limitation, diethyl-enetriaminepentaacetic acid (DTPA) or ethylenediaminetetraacetic acid (EDTA).

[1029] Yet another modification may comprise the introduction of a functional group that is one part of a specific binding pair, such as the biotin-(strept)avidin binding pair. Such a functional group may be used to link the biparatopic (or multiparatopic) polypeptides and/or Nanobody of the invention to another protein, polypeptide or chemical compound that is bound to the other half of the binding pair, i.e. through formation of the binding pair. For example, a biparatopic (or multiparatopic) polypeptides and/or Nanobody of the invention may be conjugated to biotin, and linked to another protein, polypeptide, compound or carrier conjugated to avidin or streptavidin. For example, such a conjugated biparatopic (or multiparatopic) polypeptides and/or Nanobody may be used as a reporter, for example in a diagnostic system where a detectable signal-producing agent is conjugated to avidin or streptavidin. Such binding pairs may for example also be used to bind the biparatopic (or multiparatopic) polypeptides and/or Nanobody of the invention to a carrier, including carriers suitable for pharmaceutical purposes. One non-limiting example are the liposomal formulations described by Cao and Suresh, Journal of Drug Targetting, 8, 4, 257 (2000). Such binding pairs may also be used to link a therapeutically active agent to the biparatopic (or multiparatopic) polypeptides and/or Nanobody of the invention.

[1030] Other potential chemical and enzymatical modifications will be clear to the skilled person. Such modifications may also be introduced for research purposes (e.g. to study function-activity relationships). Reference is for example made to Lundblad and Bradshaw, Biotechnol. Appf. Biochem., 26, 143-151 (1997).

[1031] Preferably, the derivatives are such that they bind to IL-6R with an affinity (suitably measured and/or expressed as a K_{D}-value (actual or apparent), a K_{A}-value (actual or apparent), a kₒₙ-rate and/or a k_{off}-rate, or alternatively as an IC₅₀ value, as further described herein) that is as defined herein for the Nanobodies of the invention.

[1032] As mentioned above, the invention also relates to proteins or polypeptides that essentially consist of or comprise at least one biparatopic (or multiparatopic) polypeptide and/or Nanobody of the invention. By “essentially consist of” is meant that the amino acid sequence of the polypeptide of the invention either is exactly the same as the amino acid sequence of a biparatopic (or multiparatopic) polypeptide and/or Nanobody of the invention or corresponds to the amino acid sequence of a biparatopic (or multiparatopic) polypeptide and/or Nanobody of the invention which has a limited number of amino acid residues, such as 1-20 amino acid residues, for example 1-10 amino acid residues and preferably 1-6 amino acid residues, such as 1, 2, 3, 4, 5 or 6 amino acid residues, added at the amino terminal end, at the carboxy terminal end, or at both the amino terminal end and the carboxy terminal end of the amino acid sequence of the biparatopic (or multiparatopic) polypeptide and/or Nanobody.

[1033] Said amino acid residues may or may not change, alter or otherwise influence the (biological) properties of the biparatopic (or multiparatopic) polypeptide and/or Nanobody and may or may not add further functionality to the biparatopic (or multiparatopic) polypeptide and/or Nanobody. For example, such amino acid residues:
[1034] can comprise an N-terminal Met residue, for example as result of expression in a heterologous host cell or host organism.
[1035] may form a signal sequence or leader sequence that directs secretion of the biparatopic (or multiparatopic) polypeptide and/or Nanobody from a host cell upon synthesis. Suitable secretory leader peptides will be clear to the skilled person, and may be as further described herein. Usually, such a leader sequence will be linked to the N-terminus of the biparatopic (or multiparatopic) polypeptide and/or Nanobody, although the invention in its broadest sense is not limited thereto;
[1036] may form a sequence or signal that allows the biparatopic (or multiparatopic) polypeptide and/or Nanobody to be directed towards and/or to penetrate or enter into specific organs, tissues, cells, or parts or compartments of cells, and/or that allows the biparatopic (or multiparatopic) polypeptide and/or Nanobody to penetrate or cross a biological barrier such as a cell membrane, a cell layer such as a layer of epithelial cells, a tumor including solid tumors, or the blood-brain-barrier. Examples of such amino acid sequences will be clear to the skilled person and include those mentioned in paragraph c) on page 112 of WO 08/020,079.
[1037] may form a “tag”, for example an amino acid sequence or residue that allows or facilitates the purification of the biparatopic (or multiparatopic) polypeptide and/or Nanobody, for example using affinity techniques directed against said sequence or residue. Thereafter, said sequence or residue may be removed (e.g. by chemical or enzymatical cleavage) to provide the biparatopic (or multiparatopic) polypeptide and/or Nanobody sequence (for this purpose, the tag may optionally be linked to the biparatopic (or multiparatopic) polypeptide and/or Nanobody sequence via a cleavable linker sequence or contain a cleavable motif). Some preferred, but non-limiting examples of such residues are multiple histidine residues, glutatione residues and a myc-tag (see for example SEQ ID NO:31 of WO 06/12282).
[1038] may be one or more amino acid residues that have been functionalized and/or that can serve as a site for attachment of functional groups. Suitable amino acid residues and functional groups will be clear to the skilled person and include, but are not limited to, the amino acid residues and functional groups mentioned herein for the derivatives of the biparatopic (or multiparatopic) polypeptides and/or Nanobodies of the invention.

[1039] According to another aspect, a polypeptide of the invention comprises a biparatopic (or multiparatopic) polypeptide and/or Nanobody of the invention, which is fused at its amino terminal end, at its carboxy terminal end, or both at its amino terminal end and at its carboxy terminal end to at least one further amino acid sequence, i.e. so as to provide a fusion protein comprising said Nanobody of the invention and the one or more further amino acid sequences. Such a fusion will also be referred to herein as a “Nanobody fusion”.

[1040] The one or more further amino acid sequence may be any suitable and/or desired amino acid sequences. The further amino acid sequences may or may not change, alter or otherwise influence the (biological) properties of the biparatopic (or multiparatopic) polypeptide and/or Nanobody, and may or may not add further functionality to the biparatopic (or multiparatopic) polypeptide and/or Nanobody or the polypeptide of the invention. Preferably, the further amino acid sequence is such that it confers one or more desired properties or functionalities to the biparatopic (or multiparatopic) polypeptide, Nanobody or the polypeptide of the invention.

[1041] For example, the further amino acid sequence may also provide a second binding site, which binding site may be directed against any desired protein, polypeptide, antigen, antigenic determinant or epitope (including but not limited to the same protein, polypeptide, antigen, antigenic determinant or epitope against which the biparatopic (or multiparatopic) polypeptide and/or Nanobody of the invention is directed, or a different protein, polypeptide, antigen, antigenic determinant or epitope).

[1042] Example of such amino acid sequences will be clear to the skilled person, and may generally comprise all amino acid sequences that are used in peptide fusions based on conventional antibodies and fragments thereof (including but not limited to ScFv's and single domain antibodies). Reference is for example made to the review by Holliger and Hudson, Nature Biotechnology, 23, 9, 1126-1136 (2005).

[1043] For example, such an amino acid sequence may be an amino acid sequence that increases the half-life, the solubility, or the absorption, reduces the immunogenicity or the toxicity, eliminates or attenuates undesirable side effects, and/or confers other advantageous properties to and/or reduces the undesired properties of the polypeptides of the invention, compared to the biparatopic (or multiparatopic) polypeptide and/or Nanobody of the invention per se. Some non-limiting examples of such amino acid sequences are serum proteins, such as human serum albumin (see for example WO 00/27435) or haptenic molecules (for example haptens that are recognized by circulating antibodies, see for example WO 98/22141).

[1044] In particular, it has been described in the art that linking fragments of immunoglobulins (such as V_{H} domains) to serum albumin or to fragments thereof can be used to increase the half-life. Reference is for made to WO 00/27435 and WO 01/077137). According to the invention, the biparatopic (or multiparatopic) polypeptide and/or Nanobody of the invention is preferably either directly linked to serum albumin (or to a suitable fragment thereof) or via a suitable linker, and in particular via a suitable peptide linked so that the polypeptide of the invention can be expressed as a genetic fusion (protein). According to one specific aspect, the biparatopic (or multiparatopic) polypeptide and/or Nanobody of the invention may be linked to a fragment of serum albumin that at least comprises the domain III of serum albumin or part thereof. Reference is for example made to WO 07/112,940 of Ablynx N.V.

[1045] Alternatively, the further amino acid sequence may provide a second binding site or binding unit that is directed against a serum protein (such as, for example, human serum albumin or another serum protein such as IgG), so as to provide increased half-life in serum. Such amino acid sequences for example include the Nanobodies described below, as well as the small peptides and binding proteins described in WO 91/01743, VVO 01/45746 and WO 02/076489 and the dAb's described in WO 03/002609 and WO 04/003019. Reference is also made to Harmsen et al., Vaccine, 23 (41); 4926-42, 2005, as well as to EP 0 368 684, as well as to WO 08/028,977, WO 08/043,821, WO 08/043,822 by Ablynx N.V. and WO 08/068,280.

[1046] Such amino acid sequences may in particular be directed against serum albumin (and more in particular human serum albumin) and/or against IgG (and more in particular human IgG). For example, such amino acid sequences may be amino acid sequences that are directed against (human) serum albumin and amino acid sequences that can bind to amino acid residues on (human) serum albumin that are not involved in binding of serum albumin to FcRn (see for example WO 06/0122787) and/or amino acid sequences that are capable of binding to amino acid residues on serum albumin that do not form part of domain III of serum albumin (see again for example WO 06/0122787); amino acid sequences that have or can provide an increased half-life (see for example WO 08/028,977 by Ablynx N.V.); amino acid sequences against human serum albumin that are cross-reactive with serum albumin from at least one species of mammal, and in particular with at least one species of primate (such as, without limitation, monkeys from the genus Macaca (such as, and in particular, cynomologus monkeys (Macaca fascicularis) and/or rhesus monkeys (Macaca mulatto)) and baboon (Paolo ursinus), reference is again made to WO 08/028,977; amino acid sequences that can bind to serum albumin in a pH independent manner (see for example WO 08/043,821 by Ablynx N.V. entitled “Amino acid sequences that bind to serum proteins in a manner that is essentially independent of the pH, compounds comprising the same, and uses thereof”) and/or amino acid sequences that are conditional binders (see for example WO 08/043,822 by Ablynx N.V. entitled “Amino acid sequences that bind to a desired molecule in a conditional manner”).

[1047] According to another aspect, the one or more further amino acid sequence may comprise one or more parts, fragments or domains of conventional 4-chain antibodies (and in particular human antibodies) and/or of heavy chain antibodies. For example, although usually less preferred, a biparatopic (or multiparatopic) polypeptide and/or Nanobody of the invention may be linked to a conventional (preferably human) V_{H} or V_{L} domain or to a natural or synthetic analog of a V_{H} or V_{L} domain, again optionally via a linker sequence (including but not limited to other (single) domain antibodies, such as the dAb's described by Ward et al.).

[1048] The at least one biparatopic (or multiparatopic) polypeptide and/or Nanobody may also be linked to one or more (preferably human) C_{H}1, C_{H}2 and/or C_{H}3 domains, optionally via a linker sequence. For instance, a biparatopic (or multiparatopic) polypeptide and/or Nanobody linked to a suitable C_{H}1 domain could for example be used—together with suitable light chains—to generate antibody fragments/structures analogous to conventional Fab fragments or F(ab′)₂ fragments, but in which one or (in case of an F(ab′)₂ fragment) one or both of the conventional V_{H} domains have been replaced by a biparatopic (or multiparatopic) polypeptide and/or Nanobody of the invention. Also, two biparatopic (or multiparatopic) polypeptide and/or Nanobodies could be linked to a C_{H}3 domain (optionally via a linker) to provide a construct with increased half-life in vivo.

[1049] According to one specific aspect of a polypeptide of the invention, one or more biparatopic (or multiparatopic) polypeptides and/or Nanobodies of the invention may be linked (optionally via a suitable linker or hinge region) to one or more constant domains (for example, 2 or 3 constant domains that can be used as part of/to form an Fc portion), to an Fc portion and/or to one or more antibody parts, fragments or domains that confer one or more effector functions to the polypeptide of the invention and/or may confer the ability to bind to one or more Fc receptors. For example, for this purpose, and without being limited thereto, the one or more further amino acid sequences may comprise one or more C_{H}2 and/or C_{H}3 domains of an antibody, such as from a heavy chain antibody (as described herein) and more preferably from a conventional human 4-chain antibody; and/or may form (part of) and Fc region, for example from IgG (e.g. from IgG1, IgG2, IgG3 or IgG4), from IgE or from another human Ig such as IgA, IgD or 1μM. For example, WO 94/04678 describes heavy chain antibodies comprising a Camelid V_{HH} domain or a humanized derivative thereof (i.e. a Nanobody), in which the Camelidae C_{H}2 and/or C_{H}3 domain have been replaced by human C_{H}2 and C_{H}3 domains, so as to provide an immunoglobulin that consists of 2 heavy chains each comprising a Nanobody and human C_{H}2 and C_{H}3 domains (but no C_{H}1 domain), which immunoglobulin has the effector function provided by the C_{H}2 and C_{H}3 domains and which immunoglobulin can function without the presence of any light chains. Other amino acid sequences that can be suitably linked to the biparatopic (or multiparatopic) polypeptides and/or Nanobodies of the invention so as to provide an effector function will be clear to the skilled person, and may be chosen on the basis of the desired effector function(s). Reference is for example made to WO 04/058820, WO 99/42077, WO 02/056910 and WO 05/017148, as well as the review by Holliger and Hudson, supra; and to WO 09/068,628. Coupling of a biparatopic (or multiparatopic) polypeptide and/or Nanobody of the invention to an Fc portion may also lead to an increased half-life, compared to the corresponding biparatopic (or multiparatopic) polypeptide and/or Nanobody of the invention. For some applications, the use of an Pc portion and/or of constant domains (i.e. C_{H}2 and/or C_{H}3 domains) that confer increased half-life without any biologically significant effector function may also be suitable or even preferred. Other suitable constructs comprising one or more biparatopic (or multiparatopic) polypeptides and/or Nanobodies and one or more constant domains with increased half-life in vivo will be clear to the skilled person, and may for example comprise two biparatopic (or multiparatopic) polypeptides and/or Nanobodies linked to a C_{H}3 domain, optionally via a linker sequence, Generally, any fusion protein or derivatives with increased half-life will preferably have a molecular weight of more than 50 kD, the cut-off value for renal absorption.

[1050] In another one specific, but non-limiting, aspect, in order to form a polypeptide of the invention, one or more biparatopic (or multiparatopic) polypeptides and/or amino acid sequences of the invention may be linked (optionally via a suitable linker or hinge region) to naturally occurring, synthetic or semisynthetic constant domains (or analogs, variants, mutants, parts or fragments thereof) that have a reduced (or essentially no) tendency to self-associate into dimers (i.e. compared to constant domains that naturally occur in conventional 4-chain antibodies). Such monomeric (i.e. not self-associating) Fc chain variants, or fragments thereof, will be clear to the skilled person. For example, Helm et al., J Biol Chem 1996 271 7494, describe monomeric Fc chain variants that can be used in the polypeptide chains of the invention.

[1051] Also, such monomeric Pc chain variants are preferably such that they are still capable of binding to the complement or the relevant Fc receptor(s) (depending on the Fc portion from which they are derived), and/or such that they still have some or all of the effector functions of the Fc portion from which they are derived (or at a reduced level still suitable for the intended use). Alternatively, in such a polypeptide chain of the invention, the monomeric Fc chain may be used to confer increased half-life upon the polypeptide chain, in which case the monomeric Fc chain may also have no or essentially no effector functions.

[1052] Bivalent/multivalent, bispecific/multispecific or biparatopic/multiparatopic polypeptides of the invention may also be linked to Fc portions, in order to provide polypeptide constructs of the type that is described in WO 09/068,630.

[1053] The further amino acid sequences may also form a signal sequence or leader sequence that directs secretion of the biparatopic (or multiparatopic) polypeptide, Nanobody or the polypeptide of the invention from a host cell upon synthesis (for example to provide a pre-, pro- or prepro-form of the polypeptide of the invention, depending on the host cell used to express the polypeptide of the invention).

[1054] The further amino acid sequence may also form a sequence or signal that allows the biparatopic (or multiparatopic) polypeptides, Nanobody or polypeptide of the invention to be directed towards and/or to penetrate or enter into specific organs, tissues, cells, or parts or compartments of cells, and/or that allows the biparatopic (or multiparatopic) polypeptide, Nanobody or polypeptide of the invention to penetrate or cross a biological barrier such as a cell membrane, a cell layer such as a layer of epithelial cells, a tumor including solid tumors, or the blood-brain-barrier. Suitable examples of such amino acid sequences will be clear to the skilled person, and for example include, but are not limited to, those mentioned on page 118 of WO 08/020,079.

[1055] According to one preferred, but non-limiting aspect, said one or more further amino acid sequences comprise at least one further Nanobody, so as to provide a polypeptide of the invention that comprises at least two, such as three, four, five or more Nanobodies, in which said Nanobodies may optionally be linked via one or more linker sequences (as defined herein). As described on pages 119 and 120 of WO 08/020,079, polypeptides of the invention that comprise two or more Nanobodies, of which at least one is a Nanobody of the invention, will also be referred to herein as “multivalent” polypeptides of the invention, and the Nanobodies present in such polypeptides will also be referred to herein as being in a “multivalent format”. For example, “bivalent” and “trivalent” polypeptides of the invention may be as further described on pages 119 and 120 of WO 08/020,079.

[1056] One preferred, but non-limiting example of a multispecific polypeptide of the invention comprises at least one biparatopic (or multiparatopic) polypeptides and/or Nanobody of the invention and at least one Nanobody that provides for an increased half-life. Such Nanobodies may for example be Nanobodies that are directed against a serum protein, and in particular a human serum protein, such as human serum albumin, thyroxine-binding protein, (human) transferrin, fibrinogen, an immunoglobulin such as IgG, IgE or IgM, or against one of the serum proteins listed in WO 04/003019. Of these, Nanobodies that can bind to serum albumin (and in particular human serum albumin) or to IgG (and in particular human IgG, see for example Nanobody VH-1 described in the review by Muyldermans, supra) are particularly preferred (although for example, for experiments in mice or primates, Nanobodies against or cross-reactive with mouse serum albumin (MSA) or serum albumin from said primate, respectively, can be used. However, for pharmaceutical use, Nanobodies against human serum albumin or human IgG will usually be preferred). Nanobodies that provide for increased half-life and that can be used in the polypeptides of the invention include the Nanobodies directed against serum albumin that are described in WO 04/041865, in WO 06/122787 and in the further patent applications by Ablynx N.V., such as those mentioned above.

[1057] For example, the some preferred Nanobodies that provide for increased half-life for use in the present invention include Nanobodies that can bind to amino acid residues on (human) serum albumin that are not involved in binding of serum albumin to FcRn (see for example WO 06/0122787); Nanobodies that are capable of binding to amino acid residues on serum albumin that do not form part of domain III of serum albumin (see for example WO 06/0122787); Nanobodies that have or can provide an increased half-life (see for example WO 08/028,977 by Ablynx N.V mentioned herein); Nanobodies against human serum albumin that are cross-reactive with serum albumin from at least one species of mammal, and in particular with at least one species of primate (such as, without limitation, monkeys from the genus Macaca (such as, and in particular, cynomologus monkeys (Macaca fascicularis) and/or rhesus monkeys (Macaca mulatto)) and baboon (Papio ursinus)) (see for example WO 08/028,977 by Abiynx N.V)); Nanobodies that can bind to serum albumin in a pH independent manner (see for example WO 08/043,821 by Abiynx N.V. mentioned herein) and/or Nanobodies that are conditional binders (see for example WO 08/043,822 by Ablynx N.V.).

[1058] Some particularly preferred Nanobodies that provide for increased half-life and that can be used in the polypeptides of the invention include the Nanobodies ALB-1 to ALB-10 disclosed in WO 06/122787 (see Tables II and III) of which ALB-8 (SEQ ID NO: 62 in WO 06/122787) is particularly preferred.

[1059] According to a specific, but non-limiting aspect of the invention, the polypeptides of the invention contain, besides the one or more biparatopic (or multiparatopic) polypeptides and/or Nanobodies of the invention, at least one Nanobody against human serum albumin.

[1060] Generally, any polypeptides of the invention with increased half-life that contain one or more biparatopic (or multiparatopic) polypeptides and/or Nanobodies of the invention, and any derivatives of biparatopic (or multiparatopic) polypeptides and/or Nanobodies of the invention or of such polypeptides that have an increased half-life, preferably have a half-life that is at least 1.5 times, preferably at least 2 times, such as at least 5 times, for example at least 10 times or more than 20 times, greater than the half-life of the corresponding biparatopic (or multiparatopic) polypeptide and/or Nanobody of the invention per se. For example, such a derivative or polypeptides with increased half-life may have a half-life that is increased with more than 1 hours, preferably more than 2 hours, more preferably more than 6 hours, such as more than 12 hours, or even more than 24, 48 or 72 hours, compared to the corresponding biparatopic (or multiparatopic) polypeptide and/or Nanobody of the invention per se.

[1061] In a preferred, but non-limiting aspect of the invention, such derivatives or polypeptides may exhibit a serum half-life in human of at least about 12 hours, preferably at least 24 hours, more preferably at least 48 hours, even more preferably at least 72 hours or more. For example, such derivatives or polypeptides may have a half-life of at least 5 days (such as about 5 to 10 days), preferably at least 9 days (such as about 9 to 14 days), more preferably at least about 10 days (such as about 10 to 15 days), or at least about 11 days (such as about 11 to 16 days), more preferably at least about 12 days (such as about 12 to 18 days or more), or more than 14 days (such as about 14 to 19 days).

[1062] According to one aspect of the invention the polypeptides are capable of binding to one or more molecules which can increase the half-life of the polypeptide in vivo.

[1063] The polypeptides of the invention are stabilised in vivo and their half-life increased by binding to molecules which resist degradation and/or clearance or sequestration. Typically, such molecules are naturally occurring proteins which themselves have a long half-life in vivo.

[1064] Another preferred, but non-limiting example of a multispecific polypeptide of the invention comprises at least one biparatopic (or multiparatopic) polypeptide and/or Nanobody of the invention and at least one Nanobody that directs the polypeptide of the invention towards, and/or that allows the polypeptide of the invention to penetrate or to enter into specific organs, tissues, cells, or parts or compartments of cells, and/or that allows the biparatopic (or multiparatopic) polypeptide and/or Nanobody to penetrate or cross a biological barrier such as a cell membrane, a cell layer such as a layer of epithelial cells, a tumor including solid tumors, or the blood-brain-barrier. Examples of such Nanobodies include Nanobodies that are directed towards specific cell-surface proteins, markers or epitopes of the desired organ, tissue or cell (for example cell-surface markers associated with tumor cells), and the single-domain brain targeting antibody fragments described in WO 02/057445 and WO 06/040153, of which FC44 (SEQ ID NO: 189 of WO 06/040153) and FC5 (SEQ ID NO: 190 of WO 06/040154) are preferred examples.

[1065] The invention also comprises derivatives of the polypeptides of the invention, which may be essentially analogous to the derivatives of the Nanobodies of the invention, i.e. as described herein.

[1066] The invention also comprises proteins or polypeptides that “essentially consist” of a polypeptide of the invention (in which the wording “essentially consist of” has essentially the same meaning as indicated hereinabove).

[1067] According to one aspect of the invention, the polypeptide of the invention is in essentially isolated from, as defined herein.

[1068] The amino acid sequences, Nanobodies, polypeptides and nucleic acids of the invention can be prepared in a manner known per se, as will be clear to the skilled person from the further description herein. For example, the Nanobodies and polypetides of the invention can be prepared in any manner known per se for the preparation of antibodies and in particular for the preparation of antibody fragments (including but not limited to (single) domain antibodies and ScFv fragments). Some preferred, but non-limiting methods for preparing the amino acid sequences, Nanobodies, polypeptides and nucleic acids include the methods and techniques described herein.

[1069] As will be clear to the skilled person, one particularly useful method for preparing an amino acid sequence, Nanobody and/or a polypeptide of the invention generally comprises the steps of:
[1070] i) the expression, in a suitable host cell or host organism (also referred to herein as a “host of the invention”) or in another suitable expression system of a nucleic acid that encodes said amino acid sequence, Nanobody or polypeptide of the invention (also referred to herein as a “nucleic acid of the invention”), optionally followed by:
[1071] ii) isolating and/or purifying the amino acid sequence, Nanobody or polypeptide of the invention thus obtained.

[1072] In particular, such a method may comprise the steps of:
[1073] i) cultivating and/or maintaining a host of the invention under conditions that are such that said host of the invention expresses and/or produces at least one amino acid sequence, Nanobody and/or polypeptide of the invention; optionally followed by:
[1074] ii) isolating and/or purifying the amino acid sequence, Nanobody or polypeptide of the invention thus obtained.

[1075] A nucleic acid of the invention can be in the form of single or double stranded DNA or RNA, and is preferably in the form of double stranded DNA. For example, the nucleotide sequences of the invention may be genomic DNA, cDNA or synthetic DNA (such as DNA with a codon usage that has been specifically adapted for expression in the intended host cell or host organism).

[1076] According to one aspect of the invention, the nucleic acid of the invention is in essentially isolated from, as defined herein.

[1077] The nucleic acid of the invention may also be in the form of, be present in and/or be part of a vector, such as for example a plasmid, cosmid or YAC, which again may be in essentially isolated form.

[1078] The nucleic acids of the invention can be prepared or obtained in a manner known per se, based on the information on the amino acid sequences for the polypeptides of the invention given herein, and/or can be isolated from a suitable natural source. To provide analogs, nucleotide sequences encoding naturally occurring V_{HH} domains can for example be subjected to site-directed mutagenesis, so at to provide a nucleic acid of the invention encoding said analog. Also, as will be clear to the skilled person, to prepare a nucleic acid of the invention, also several nucleotide sequences, such as at least one nucleotide sequence encoding a Nanobody and for example nucleic acids encoding one or more linkers can be linked together in a suitable manner.

[1079] Techniques for generating the nucleic acids of the invention will be clear to the skilled person and may for instance include, but are not limited to, automated DNA synthesis; site-directed mutagenesis; combining two or more naturally occurring and/or synthetic sequences (or two or more parts thereof), introduction of mutations that lead to the expression of a truncated expression product; introduction of one or more restriction sites (e.g. to create cassettes and/or regions that may easily be digested and/or ligated using suitable restriction enzymes), and/or the introduction of mutations by means of a PCR reaction using one or more “mismatched” primers, using for example a sequence of a naturally occurring form of IL-6R as a template. These and other techniques will be clear to the skilled person, and reference is again made to the standard handbooks, such as Sambrook et al. and Ausubel et al., mentioned above, as well as the Examples below.

[1080] The nucleic acid of the invention may also be in the form of, be present in and/or be part of a genetic construct, as will be clear to the person skilled in the art and as described on pages 131-134 of WO 08/020,079 (incorporated herein by reference). Such genetic constructs generally comprise at least one nucleic acid of the invention that is optionally linked to one or more elements of genetic constructs known per se, such as for example one or more suitable regulatory elements (such as a suitable promoter(s), enhancer(s), terminator(s), etc.) and the further elements of genetic constructs referred to herein. Such genetic constructs comprising at least one nucleic acid of the invention will also be referred to herein as “genetic constructs of the invention”.

[1081] The genetic constructs of the invention may be DNA or RNA, and are preferably double-stranded DNA. The genetic constructs of the invention may also be in a form suitable for transformation of the intended host cell or host organism, in a form suitable for integration into the genomic DNA of the intended host cell or in a form suitable for independent replication, maintenance and/or inheritance in the intended host organism. For instance, the genetic constructs of the invention may be in the form of a vector, such as for example a plasmid, cosmid, YAC, a viral vector or transposon. In particular, the vector may be an expression vector, i.e. a vector that can provide for expression in vitro and/or in vivo (e.g. in a suitable host cell, host organism and/or expression system).

[1082] In a preferred but non-limiting aspect, a genetic construct of the invention comprises
[1083] i) at least one nucleic acid of the invention; operably connected to
[1084] ii) one or more regulatory elements, such as a promoter and optionally a suitable terminator;
   and optionally also
[1085] iii) one or more further elements of genetic constructs known per se;

[1086] in which the terms “operably connected” and “operably linked” have the meaning given on pages 131-134 of WO 08/020,079; and in which the “regulatory elements”, “promoter”, “terminator” and “further elements” are as described on pages 131-134 of WO 08/020,079; and in which the genetic constructs may further be as described on pages 131-134 of WO 08/020,079.

[1087] The nucleic acids of the invention and/or the genetic constructs of the invention may be used to transform a host cell or host organism, i.e. for expression and/or production of the amino acid sequence, Nanobody or polypeptide of the invention. Suitable hosts or host cells will be clear to the skilled person, and may for example be any suitable fungal, prokaryotic or eukaryotic cell or cell line or any suitable fungal, prokaryotic or eukaryotic organism, for example those described on pages 134 and 135 of WO 08/020,079; as well as all other hosts or host cells known per se for the expression and production of antibodies and antibody fragments (including but not limited to (single) domain antibodies and ScFv fragments), which will be clear to the skilled person. Reference is also made to the general background art cited hereinabove, as well as to for example WO 94/29457; WO 96/34103; WO 99/42077; Frenken et al., (1998), supra; Riechmann and Muyldermans, (1999), supra; van der Linden, (2000), supra; Thomassen et al., (2002), supra; Joosten et al., (2003), supra; Joosten et al., (2005), supra; and the further references cited herein.

[1088] The amino acid sequences, Nanobodies and polypeptides of the invention can also be introduced and expressed in one or more cells, tissues or organs of a multicellular organism, for example for prophylactic and/or therapeutic purposes (e.g. as a gene therapy), as further described on pages 135 and 136 of in WO 08/020,079 and in the further references cited in WO 08/020,079.

[1089] For expression of the Nanobodies in a cell, they may also be expressed as so-called “intrabodies”, as for example described in WO 94/02610, WO 95/22618 and U.S. Pat. No. 7,004,940; WO 03/014960; in Cattaneo, A. & Biocca, S. (1997) Intracellular Antibodies: Development and Applications. Landes and Springer-Verlag; and in Kontermann, Methods 34, (2004), 163-170.

[1090] The amino acid sequences, Nanobodies and polypeptides of the invention can for example also be produced in the milk of transgenic mammals, for example in the milk of rabbits, cows, goats or sheep (see for example U.S. Pat. No. 6,741,957, U.S. Pat. No. 6,304,489 and U.S. Pat. No. 6,849,992 for general techniques for introducing transgenes into mammals), in plants or parts of plants including but not limited to their leaves, flowers, fruits, seed, roots or turbers (for example in tobacco, maize, soybean or alfalfa) or in for example pupae of the silkworm Bornbix mori.

[1091] Furthermore, the amino acid sequences, Nanobodies and polypeptides of the invention can also be expressed and/or produced in cell-free expression systems, and suitable examples of such systems will be clear to the skilled person. Some preferred, but non-limiting examples include expression in the wheat germ system; in rabbit reticulocyte lysates; or in the E. coli Zubay system.

[1092] As mentioned above, one of the advantages of the use of Nanobodies is that the polypeptides based thereon can be prepared through expression in a suitable bacterial system, and suitable bacterial expression systems, vectors, host cells, regulatory elements, etc., will be clear to the skilled person, for example from the references cited above. It should however be noted that the invention in its broadest sense is not limited to expression in bacterial systems.

[1093] Preferably, in the invention, an (in vivo or in vitro) expression system, such as a bacterial expression system, is used that provides the polypeptides of the invention in a form that is suitable for pharmaceutical use, and such expression systems will again be clear to the skilled person. As also will be clear to the skilled person, polypeptides of the invention suitable for pharmaceutical use can be prepared using techniques for peptide synthesis.

[1094] For production on industrial scale, preferred heterologous hosts for the (industrial) production of Nanobodies or Nanobody-containing protein therapeutics include strains of E. coli, Pichia pastoris, S. cerevisiae that are suitable for large scale expression/production/fermentation, and in particular for large scale pharmaceutical (i.e. GMP grade)

expression/production/fermentation. Suitable examples of such strains will be clear to the skilled person. Such strains and production/expression systems are also made available by companies such as Biovitrum (Uppsala, Sweden).

[1095] Alternatively, mammalian cell lines, in particular Chinese hamster ovary (CHO) cells, can be used for large scale expression/production/fermentation, and in particular for large scale pharmaceutical expression/production/fermentation. Again, such expression/production systems are also made available by some of the companies mentioned above.

[1096] The choice of the specific expression system would depend in part on the requirement for certain post-translational modifications, more specifically glycosylation. The production of a Nanobody-containing recombinant protein for which glycosylation is desired or required would necessitate the use of mammalian expression hosts that have the ability to glycosylate the expressed protein. In this respect, it will be clear to the skilled person that the glycosylation pattern obtained (i.e. the kind, number and position of residues attached) will depend on the cell or cell line that is used for the expression. Preferably, either a human cell or cell line is used (i.e. leading to a protein that essentially has a human glycosylation pattern) or another mammalian cell line is used that can provide a glycosylation pattern that is essentially and/or functionally the same as human glycosylation or at least mimics human glycosylation. Generally, prokaryotic hosts such as E. coli do not have the ability to glycosylate proteins, and the use of lower eukaryotes such as yeast usually leads to a glycosylation pattern that differs from human glycosylation. Nevertheless, it should be understood that all the foregoing host cells and expression systems can be used in the invention, depending on the desired amino acid sequence, Nanobody or polypeptide to be obtained.

[1097] Thus, according to one non-limiting aspect of the invention, the amino acid sequence, Nanobody or polypeptide of the invention is glycosylated. According to another non-limiting aspect of the invention, the amino acid sequence, Nanobody or polypeptide of the invention is non-glycosylated.

[1098] According to one preferred, but non-limiting aspect of the invention, the amino acid sequence, Nanobody or polypeptide of the invention is produced in a bacterial cell, in particular a bacterial cell suitable for large scale pharmaceutical production, such as cells of the strains mentioned above.

[1099] According to another preferred, but non-limiting aspect of the invention, the amino acid sequence, Nanobody or polypeptide of the invention is produced in a yeast cell, in particular a yeast cell suitable for large scale pharmaceutical production, such as cells of the species mentioned above.

[1100] According to yet another preferred, but non-limiting aspect of the invention, the amino acid sequence, Nanobody or polypeptide of the invention is produced in a mammalian cell, in particular in a human cell or in a cell of a human cell line, and more in particular in a human cell or in a cell of a human cell line that is suitable for large scale pharmaceutical production, such as the cell lines mentioned hereinabove.

[1101] As further described on pages 138 and 139 of WO 08/020,079, when expression in a host cell is used to produce the amino acid sequences, Nanobodies and the polypeptides of the invention, the amino acid sequences, Nanobodies and polypeptides of the invention can be produced either intracellularly (e.g. in the cytosol, in the periplasma or in inclusion bodies) and then isolated from the host cells and optionally further purified; or can be produced extracellularly (e.g. in the medium in which the host cells are cultured) and then isolated from the culture medium and optionally further purified. Thus, according to one non-limiting aspect of the invention, the amino acid sequence, Nanobody or polypeptide of the invention is an amino acid sequence, Nanobody or polypeptide that has been produced intracellularly and that has been isolated from the host cell, and in particular from a bacterial cell or from an inclusion body in a bacterial cell. According to another non-limiting aspect of the invention, the amino acid sequence, Nanobody or polypeptide of the invention is an amino acid sequence, Nanobody or polypeptide that has been produced extracellularly, and that has been isolated from the medium in which the host cell is cultivated.

[1102] Some preferred, but non-limiting promoters for use with these host cells include those mentioned on pages 139 and 140 of WO 08/020,079.

[1103] Some preferred, but non-limiting secretory sequences for use with these host cells include those mentioned on page 140 of WO 08/020,079.

[1104] Suitable techniques for transforming a host or host cell of the invention will be clear to the skilled person and may depend on the intended host cell/host organism and the genetic construct to be used. Reference is again made to the handbooks and patent applications mentioned above.

[1105] After transformation, a step for detecting and selecting those host cells or host organisms that have been successfully transformed with the nucleotide sequence/genetic construct of the invention may be performed. This may for instance be a selection step based on a selectable marker present in the genetic construct of the invention or a step involving the detection of the amino acid sequence of the invention, e.g. using specific antibodies.

[1106] The transformed host cell (which may be in the form or a stable cell line) or host organisms (which may be in the form of a stable mutant line or strain) form further aspects of the present invention.

[1107] Preferably, these host cells or host organisms are such that they express, or are (at least) capable of expressing (e.g. under suitable conditions), an amino acid sequence, Nanobody or polypeptide of the invention (and in case of a host organism: in at least one cell, part, tissue or organ thereof). The invention also includes further generations, progeny and/or offspring of the host cell or host organism of the invention, that may for instance be obtained by cell division or by sexual or asexual reproduction.

[1108] To produce/obtain expression of the amino acid sequences of the invention, the transformed host cell or transformed host organism may generally be kept, maintained and/or cultured under conditions such that the (desired) amino acid sequence, Nanobody or polypeptide of the invention is expressed/produced. Suitable conditions will be clear to the skilled person and will usually depend upon the host cell/host organism used, as well as on the regulatory elements that control the expression of the (relevant) nucleotide sequence of the invention. Again, reference is made to the handbooks and patent applications mentioned above in the paragraphs on the genetic constructs of the invention.

[1109] Generally, suitable conditions may include the use of a suitable medium, the presence of a suitable source of food and/or suitable nutrients, the use of a suitable temperature, and optionally the presence of a suitable inducing factor or compound (e.g. when the nucleotide sequences of the invention are under the control of an inducible promoter); all of which may be selected by the skilled person. Again, under such conditions, the amino acid sequences of the invention may be expressed in a constitutive manner, in a transient manner, or only when suitably induced.

[1110] It will also be clear to the skilled person that the amino acid sequence, Nanobody or polypeptide of the invention may (first) be generated in an immature form (as mentioned above), which may then be subjected to post-translational modification, depending on the host cell/host organism used. Also, the amino acid sequence, Nanobody or polypeptide of the invention may be glycosylated, again depending on the host cell/host organism used.

[1111] The amino acid sequence, Nanobody or polypeptide of the invention may then be isolated from the host cell/host organism and/or from the medium in which said host cell or host organism was cultivated, using protein isolation and/or purification techniques known per se, such as (preparative) chromatography and/or electrophoresis techniques, differential precipitation techniques, affinity techniques (e.g. using a specific, cleavable amino acid sequence fused with the amino acid sequence, Nanobody or polypeptide of the invention) and/or preparative immunological techniques (i.e. using antibodies against the amino acid sequence to be isolated).

[1112] Generally, for pharmaceutical use, the polypeptides of the invention may be formulated as a pharmaceutical preparation or compositions comprising at least one polypeptide of the invention and at least one pharmaceutically acceptable carrier, diluent or excipient and/or adjuvant, and optionally one or more further pharmaceutically active polypeptides and/or compounds. By means of non-limiting examples, such a formulation may be in a form suitable for oral administration, for parenteral administration (such as by intravenous, intramuscular or subcutaneous injection or intravenous infusion), for topical administration, for administration by inhalation, by a skin patch, by an implant, by a suppository, etc. Such suitable administration forms—which may be solid, semi-solid or liquid, depending on the manner of administration—as well as methods and carriers for use in the preparation thereof, will be clear to the skilled person, and are further described herein.

[1113] Thus, in a further aspect, the invention relates to a pharmaceutical composition that contains at least one amino acid of the invention, at least one Nanobody of the invention or at least one polypeptide of the invention and at least one suitable carrier, diluent or excipient (i.e. suitable for pharmaceutical use), and optionally one or more further active substances.

[1114] Generally, the amino acid sequences, Nanobodies and polypeptides of the invention can be formulated and administered in any suitable manner known per se, for which reference is for example made to the general background art cited above (and in particular to WO 04/041862, WO 04/041863, WO 04/041865, WO 04/041867 and WO 08/020,079) as well as to the standard handbooks, such as Remington's Pharmaceutical Sciences, 18^{th} Ed., Mack Publishing Company, USA (1990), Remington, the Science and Practice of Pharmacy, 21th Edition, Lippincott Williams and Wilkins (2005); or the Handbook of Therapeutic Antibodies (S. Dubel, Ed.), Wiley, Weinheim, 2007 (see for example pages 252-255).

[1115] For example, the amino acid sequences, Nanobodies and polypeptides of the invention may be formulated and administered in any manner known per se for conventional antibodies and antibody fragments (including ScFv's and diabodies) and other pharmaceutically active proteins. Such formulations and methods for preparing the same will be clear to the skilled person, and for example include preparations suitable for parenteral administration (for example intravenous, intraperitoneal, subcutaneous, intramuscular, intraluminal, intra-arterial or intrathecal administration) or for topical (i.e. transdermal or intradermal) administration.

[1116] Preparations for parenteral administration may for example be sterile solutions, suspensions, dispersions or emulsions that are suitable for infusion or injection. Suitable carriers or diluents for such preparations for example include, without limitation, those mentioned on page 143 of WO 08/020,079. Usually, aqueous solutions or suspensions will be preferred.

[1117] The amino acid sequences, Nanobodies and polypeptides of the invention can also be administered using gene therapy methods of delivery. See, e.g., U.S. Pat. No. 5,399,346, which is incorporated by reference in its entirety. Using a gene therapy method of delivery, primary cells transfected with the gene encoding an amino acid sequence, Nanobody or polypeptide of the invention can additionally be transfected with tissue specific promoters to target specific organs, tissue, grafts, tumors, or cells and can additionally be transfected with signal and stabilization sequences for subcellularly localized expression.

[1118] Thus, the amino acid sequences, Nanobodies and polypeptides of the invention may be systemically administered, e.g., orally, in combination with a pharmaceutically acceptable vehicle such as an inert diluent or an assimilable edible carrier. They may be enclosed in hard or soft shell gelatin capsules, may be compressed into tablets, or may be incorporated directly with the food of the patient's diet. For oral therapeutic administration, the amino acid sequences, Nanobodies and polypeptides of the invention may be combined with one or more excipients and used in the form of ingestible tablets, buccal tablets, troches, capsules, elixirs, suspensions, syrups, wafers, and the like. Such compositions and preparations should contain at least 0.1% of the amino acid sequence, Nanobody or polypeptide of the invention. Their percentage in the compositions and preparations may, of course, be varied and may conveniently be between about 2 to about 60% of the weight of a given unit dosage form. The amount of the amino acid sequence, Nanobody or polypeptide of the invention in such therapeutically useful compositions is such that an effective dosage level will be obtained.

[1119] The tablets, troches, pills, capsules, and the like may also contain binders, excipients, disintegrating agents, lubricants and sweetening or flavouring agents, for example those mentioned on pages 143-144 of WO 08/020,079. When the unit dosage form is a capsule, it may contain, in addition to materials of the above type, a liquid carrier, such as a vegetable oil or a polyethylene glycol. Various other materials may be present as coatings or to otherwise modify the physical form of the solid unit dosage form. For instance, tablets, pills, or capsules may be coated with gelatin, wax, shellac or sugar and the like. A syrup or elixir may contain the amino acid sequences, Nanobodies and polypeptides of the invention, sucrose or fructose as a sweetening agent, methyl and propylparabens as preservatives, a dye and flavoring such as cherry or orange flavor. Of course, any material used in preparing any unit dosage form should be pharmaceutically acceptable and substantially non-toxic in the amounts employed. In addition, the amino acid sequences, Nanobodies and polypeptides of the invention may be incorporated into sustained-release preparations and devices.

[1120] Preparations and formulations for oral administration may also be provided with an enteric coating that will allow the constructs of the invention to resist the gastric environment and pass into the intestines. More generally, preparations and formulations for oral administration may be suitably formulated for delivery into any desired part of the gastrointestinal tract. In addition, suitable suppositories may be used for delivery into the gastrointestinal tract.

[1121] The amino acid sequences, Nanobodies and polypeptides of the invention may also be administered intravenously or intraperitoneally by infusion or injection, as further described on pages 144 and 145 of WO 08/020,079.

[1122] For topical administration, the amino acid sequences, Nanobodies and polypeptides of the invention may be applied in pure form, i.e., when they are liquids. However, it will generally be desirable to administer them to the skin as compositions or formulations, in combination with a dermatologically acceptable carrier, which may be a solid or a liquid, as further described on page 145 of WO 08/020,079.

[1123] Generally, the concentration of the amino acid sequences, Nanobodies and polypeptides of the invention in a liquid composition, such as a lotion, will be from about 0.1-25 wt-%, preferably from about 0.5-10 wt-%. The concentration in a semi-solid or solid composition such as a gel or a powder will be about 0.1-5 wt-%, preferably about 0.5-2.5 wt-%.

[1124] The amount of the amino acid sequences, Nanobodies and polypeptides of the invention required for use in treatment will vary not only with the particular amino acid sequence, Nanobody or polypeptide selected but also with the route of administration, the nature of the condition being treated and the age and condition of the patient and will be ultimately at the discretion of the attendant physician or clinician. Also the dosage of the amino acid sequences, Nanobodies and polypeptides of the invention varies depending on the target cell, tumor, tissue, graft, or organ.

[1125] The desired dose may conveniently be presented in a single dose or as divided doses administered at appropriate intervals, for example, as two, three, four or more sub-doses per day. The sub-dose itself may be further divided, e.g., into a number of discrete loosely spaced administrations; such as multiple inhalations from an insufflator or by application of a plurality of drops into the eye.

[1126] An administration regimen could include long-term, daily treatment. By “long-term” is meant at least two weeks and preferably, several weeks, months, or years of duration. Necessary modifications in this dosage range may be determined by one of ordinary skill in the art using only routine experimentation given the teachings herein. See Remington's Pharmaceutical Sciences (Martin, E. W., ed. 4), Mack Publishing Co., Easton, Pa. The dosage can also be adjusted by the individual physician in the event of any complication.

[1127] The invention further relates to applications and uses of the amino acid sequences, compounds, constructs, polypeptides, nucleic acids, host cells, products and compositions described herein, as well as to methods for the prevention and/or treatment for diseases and disorders associated with IL-6R. Some preferred but non-limiting applications and uses will become clear from the further description herein.

[1128] The amino acid sequences, Nanobodies, compounds, constructs, polypeptides, and preferably biparatopic (or multiparatopic) polypeptides, and compositions of the present invention can generally be used to modulate, and in particular inhibit and/or prevent, binding of IL-6R to IL-6 and/or binding of the IL-6/IL-6R complex to gp130 and thus to modulate, and in particular inhibit or prevent, the signalling that is mediated by IL-6R, IL-6, IL6/IL-6R complex or gp130 to modulate the biological pathways in which IL-6R, IL-6, the IL6/IL-6R complex and/or gp130 are involved, and/or to modulate the biological mechanisms, responses and effects associated with such signalling or these pathways.

[1129] In the context of the present invention “modulating the interaction between IL-6/IL-6R complex and gp130” can for example mean:
[1130] binding to IL-6R (i.e. as such or as present in the IL-6/IL-6R complex) in such a way that the formation of the IL-6/IL-6R complex is inhibited or affected (e.g. fully or partially disrupted) in such a way that the binding of the complex to—e.g. its affinity for—gp130 is reduced (or reversely, that the binding of gp 130 to—e.g. its affinity for—the complex is reduced), so that the signaling induced/mediated by the binding of the complex to gp130 is modulated (e.g. reduced);
   or
[1131] binding to IL-6R (i.e. as such or as present in the IL-6/IL-6R complex) in such a way that the formation of the IL-6/IL-6R complex essentially is not affected but that the binding of said complex to gp130 is modulated (e.g. inhibited), so that the signalling induced/mediated by the binding of the complex to gp130 is modulated (e.g. reduced);
   both compared to the formation of the complex and its binding to gp130 without the presence of the amino acid sequence, Nanobody, compound, construct, polypeptide, and preferably biparatopic (or multiparatopic) polypeptide, and composition of the present invention.

[1132] Accordingly, in one specific, but non-limiting aspect, the invention provides amino acid sequences, Nanobodies, compounds, constructs, polypeptides, and preferably biparatopic (or multiparatopic) polypeptides, and compositions that are, and/or that can be used as, an antagonist of IL-6, of IL-6R, of IL-6- or IL-6R-mediated signalling, and/or of the biological pathways mechanisms, responses and/or effects in which IL-6, IL-6R and/or IL-6- or IL-6R mediated signalling are involved.

[1133] In another specific, but non-limiting aspect, the amino acid sequences, Nanobodies, compounds, polypeptides and preferably biparatopic (or multiparatopic) polypeptides described herein are such that they (a) specifically bind (as defined herein) to the IL-6 receptor; and (b) are capable of downregulating the IL-6 receptor and/or are capable of inhibiting, decreasing or downregulating the signalling of the IL-6 receptor and/or the pathway(s), mechanism(s) or signalling in which the IL-6 or IL-6R is involved. As will be clear to the skilled person, such an amino acid sequence, Nanobody, compound, polypeptide and preferably biparatopic (or multiparatopic) polypeptide can generally be used as an antagonist of IL-6, of the IL-6 receptor and/or of the biological pathways, mechanisms or effects in which IL-6, Il-6R and/or Il-6/IL-6R mediated signalling is involved. Any such decrease or downregulation (which can be at least 1%, such as at least 5%, or more than 10%, or up to 50% or 100% or more in a relevant parameter, compared to the same parameter under conditions in which the amino acid sequence, Nanobody, compound, polypeptide and preferably biparatopic (or multiparatopic) polypeptide is not bound to the IL-6 receptor), may be measured in any suitable manner known per se, for example using one of the assays used in the Experimental Part and/or mentioned herein.

[1134] For example, such antagonistic amino acid sequences, Nanobodies, compounds, polypeptides and preferably biparatopic (or multiparatopic) polypeptides may be competitive of non-competitive inhibitors of the binding of IL-6 to IL-6R.

[1135] More in particular, and in addition to (a) and (b) above, and optionally in addition to (d) and/or (e) below, such antagonistic the amino acid sequences, Nanobodies, compounds, polypeptides and preferably biparatopic (or multiparatopic) polypeptides may bind to IL-6R in such a way that (c) binding of IL-6 to IL-6R is blocked, inhibited or reduced; compared to the binding of IL-6 to its receptor without the presence of the amino acid sequence, Nanobody, compound, polypeptide and preferably biparatopic (or multiparatopic) polypeptide.

[1136] For example, and without limitation, such antagonistic the amino acid sequences, Nanobodies, compounds, polypeptides and preferably biparatopic (or multiparatopic) polypeptides may bind to or close to the IL-6 binding site on IL-6R.

[1137] Also, in addition to (a) and (b) above, and optionally in addition to (c) above or (e) below, such antagonistic amino acid sequences, Nanobodies, compounds, polypeptides and preferably biparatopic (or multiparatopic) polypeptides may bind to IL-6R (i.e. as such or as present in the IL-6/IL-6R complex) in such a way that (d) the formation of the IL-6/IL-6R complex is inhibited or affected (e.g. fully or partially disrupted) in such a way that the binding of the complex to—e.g. its affinity for—gp130 is reduced (or reversely, that the binding of gp 130 to—e.g. its affinity for—the complex is reduced), so that the signaling induced/mediated by the binding of the complex to gp130 is modulated (e.g. reduced); compared to the formation of the complex and its binding to gp130 without the presence of the amino acid sequence, Nanobody, compound, polypeptide and preferably biparatopic (or multiparatopic) polypeptide of the invention.

[1138] Also, in addition to (a) and (b) above, and optionally in addition to (c) or (d) above, such antagonistic amino acid sequences, Nanobodies, compounds, polypeptides and preferably biparatopic (or multiparatopic) polypeptides may bind to IL-6R (i.e. as such or as present in the IL-6/IL-6R complex) in such a way that (e) that the formation of the IL-6/IL-6R complex essentially is not affected but that the binding of said complex to gp130 is modulated (e.g. inhibited), so that the signalling induced/mediated by the binding of the complex to gp130 is modulated (e.g. reduced); compared to the formation of the complex and its binding to gp130 without the presence of the amino acid sequence, Nanobody, compound, polypeptide and preferably biparatopic (or multiparatopic) polypeptide of the invention.

[1139] Alternatively, such antagonistic the amino acid sequences, Nanobodies, compounds, polypeptides and preferably biparatopic (or multiparatopic) polypeptides may bind to another epitope, site, domain or region on the IL-6 receptor (e.g. allosteric binding) such that the IL-6 receptor becomes less sensitive for binding of IL-6 (and/or that the signalling of the IL-6 receptor upon binding of IL-6 is reduced).

[1140] It is also possible that such antagonistic the amino acid sequences, Nano bodies, compounds, polypeptides and preferably biparatopic (or multiparatopic) polypeptides may bind to another epitope, site, domain or region on the IL-6 receptor.

[1141] Accordingly, in the context of the present invention, “modulating” or “to modulate” generally means exercising an agonistic or antagonistic effect, respectively, with respect to IL-6, IL-6R and/or the biological pathways, responses, signalling, mechanisms or effects in which IL-6 and/or IL-6R is involved. In particular, “modulating” or “to modulate” may mean either an such an agonistic or antagonistic effect (i.e. a full or partial agonistic or antagonistic effect, respectively), as measured using a suitable in vitro, cellular or in vivo assay (such as those mentioned herein), that leads to a change in a relevant parameter by at least 1%, preferably at least 5%, such as at least 10% or at least 25%, for example by at least 50%, at least 60%, at least 70%, at least 80%, or 90% or more, compared to same parameter in the same assay under the same conditions but without the presence of the amino acid sequence, Nanobody, compound, polypeptide and preferably biparatopic (or multiparatopic) polypeptides of the invention.

[1142] Without being limiting, in one aspect, the amino acid sequence, Nanobody, polypeptide and preferably biparatopic (or multiparatopic) polypeptide of the invention or the composition comprising the same will inhibit and/or block binding of IL-6 to IL-6R. The amino acid sequence, Nanobody, polypeptide and preferably biparatopic (or multiparatopic) polypeptide of the invention or the composition comprising the same will preferably inhibit binding of IL-6 to IL-6R by at least 1%, preferably at least 5%, such as at least 10%, for example 25% or more or even 50% or more and up to 75% or even more than 90% or more, compared to binding of IL-6 to IL-6R in the absence of the amino acid sequence, Nanobody, polypeptide and preferably biparatopic (or multiparatopic) polypeptide of the invention or the composition comprising the same.

[1143] In another aspect, the amino acid sequence, Nanobody, polypeptide and preferably biparatopic (or multiparatopic) polypeptide of the invention or the composition comprising the same will inhibit and/or block binding of the IL-6/IL-6R complex to gp130. The amino acid sequence, Nanobody, polypeptide and preferably biparatopic (or multiparatopic) polypeptide of the invention or the composition comprising the same will preferably inhibit binding of the IL-6/IL-6R complex to gp130 by at least 1%, preferably at least 5%, such as at least 10%, for example 25% or more or even 50% or more and up to 75% or even more than 90% or more, compared to binding of the IL-6/IL-6R complex to gp130 in the absence of the amino acid sequence, Nanobody, polypeptide and preferably biparatopic (or multiparatopic) polypeptide of the invention or the composition comprising the same.

[1144] In another aspect, the amino acid sequence, Nanobody, polypeptide and preferably biparatopic (or multiparatopic) polypeptide of the invention or the composition comprising the same will inhibit and/or block binding of the reference IgG (SEQ ID NO's: 126 and 127) and/or reference Fab (SEQ ID NO's: 128 and 129) to IL-6R. The amino acid sequence, Nanobody, polypeptide and preferably biparatopic (or multiparatopic) polypeptide of the invention or the composition comprising the same will preferably inhibit binding of the reference IgG and/or reference Fab to IL-6R by at least 1%, preferably at least 5%, such as at least 10%, for example 25% or more or even 50% or more and up to 75% or even more than 90% or more, compared to binding of the reference IgG and/or reference Fab to IL-6R in the absence of the amino acid sequence, Nanobody, polypeptide and preferably biparatopic (or multiparatopic) polypeptide of the invention or the composition comprising the same.

[1145] In another aspect, the amino acid sequence, Nanobody, polypeptide and preferably biparatopic (or multiparatopic) polypeptide of the invention or the composition comprising the same will inhibit and/or block binding of Tocilizumab (MRA) to IL-6R. The amino acid sequence, Nanobody, polypeptide and preferably biparatopic (or multiparatopic) polypeptide of the invention or the composition comprising the same will preferably inhibit binding of Tocilizumab (MRA) to IL-6R by at least 1%, preferably at least 5%, such as at least 10%, for example 25% or more or even 50% or more and up to 75% or even more than 90% or more, compared to binding of Tocilizumab (MRA) in the absence of the amino acid sequence, Nanobody or (biparatopic or multiparatopic) polypeptide of the invention or the composition comprising the same.

[1146] In another aspect, the amino acid sequence, Nanobody, polypeptide and preferably biparatopic (or multiparatopic) polypeptide of the invention or the composition comprising the same will inhibit and/or block binding of M182 to IL-6R. The amino acid sequence, Nanobody, polypeptide and preferably biparatopic (or multiparatopic) polypeptide of the invention or the composition comprising the same will preferably inhibit binding M182 to IL-6R by at least 1%, preferably at least 5%, such as at least 10%, for example 25% or more or even 50% or more and up to 75% or even more than 90% or more, compared to binding of M182 in the absence of the amino acid sequence, Nanobody, polypeptide and preferably biparatopic (or multiparatopic) polypeptide of the invention or the composition comprising the same.

[1147] In another aspect, the amino acid sequence, Nanobody, polypeptide and preferably biparatopic (or multiparatopic) polypeptide of the invention or the composition comprising the same will inhibit and/or block binding of BN-12 to IL-6R. The amino acid sequence, Nanobody, polypeptide and preferably biparatopic (or multiparatopic) polypeptide of the invention or the composition comprising the same will preferably inhibit binding BN-12 to IL-6R by at least 1%, preferably at least 5%, such as at least 10%, for example 25% or more or even 50% or more and up to 75% or even more than 90% or more, compared to binding of BN-12 in the absence of the amino acid sequence, Nanobody, polypeptide and preferably biparatopic (or multiparatopic) polypeptide of the invention or the composition comprising the same.

[1148] In another aspect, the amino acid sequence, Nanobody, polypeptide and preferably biparatopic (or multiparatopic) polypeptide of the invention or the composition comprising the same will inhibit and/or block binding of IL-6 to IL-6R and binding of gp130 to the IL-6/IL-6R complex, preferably essentially simultaneously. The amino acid sequence, Nanobody, polypeptide and preferably biparatopic (or multiparatopic) polypeptide of the invention or the composition comprising the same will preferably inhibit binding of IL-6 to IL-6R by at least 1%, preferably at least 5%, such as at least 10%, for example 25% or more or even 50% or more and up to 75% or even more than 90% or more, compared to binding of IL-6 to IL-6R in the absence of the amino acid sequence, Nanobody, polypeptide and preferably biparatopic (or multiparatopic) polypeptide of the invention or the composition comprising the same; and the amino acid sequence, Nanobody, polypeptide and preferably biparatopic (or multiparatopic) polypeptide of the invention or the composition comprising the same will preferably inhibit binding of gp130 to the IL-6/IL-6R complex by at least 1%, preferably at least 5%, such as at least 10%, for example 25% or more or even 50% or more and up to 75% or even more than 90% or more, compared to binding of gp130 to the IL-6/IL-6R complex in the absence of the amino acid sequence, Nanobody, polypeptide and preferably biparatopic (or multiparatopic) polypeptide of the invention or the composition comprising the same.

[1149] In another aspect, the amino acid sequence, Nanobody, polypeptide and preferably biparatopic (or multiparatopic) polypeptide of the invention or the composition comprising the same will inhibit and/or block binding of IL-6 to IL-6R and binding of the reference IgG and/or reference Fab to IL-6R, preferably essentially simultaneously. The amino acid sequence, Nanobody, polypeptide and preferably biparatopic (or multiparatopic) polypeptide of the invention or the composition comprising the same will preferably inhibit binding of IL-6 to IL-6R by at least 1%, preferably at least 5%, such as at least 10%, for example 25% or more or even 50% or more and up to 75% or even more than 90% or more, compared to binding of IL-6 to IL-6R in the absence of the amino acid sequence, Nanobody, polypeptide and preferably biparatopic (or multiparatopic) polypeptide of the invention or the composition comprising the same; and the amino acid sequence, Nanobody, polypeptide and preferably biparatopic (or multiparatopic) polypeptide of the invention or the composition comprising the same will preferably inhibit binding of the reference IgG and/or reference Fab to IL-6R by at least 1%, preferably at least 5%, such as at least 10%, for example 25% or more or even 50% or more and up to 75% or even more than 90% or more, compared to binding of the reference IgG and/or Fab to IL-6R in the absence of the amino acid sequence, Nanobody, polypeptide and preferably biparatopic (or multiparatopic) polypeptide of the invention or the composition comprising the same.

[1150] In another aspect, the amino acid sequence, Nanobody, polypeptide and preferably biparatopic (or multiparatopic) polypeptide of the invention or the composition comprising the same will inhibit and/or block binding of IL-6 to IL-6R and binding of Tocilizumab (MRA) to the IL-6R, preferably essentially simultaneously. The amino acid sequence, Nanobody, polypeptide and preferably biparatopic (or multiparatopic) polypeptide of the invention or the composition comprising the same will preferably inhibit binding of IL-6 to IL-6R by at least 1%, preferably at least 5%, such as at least 10%, for example 25% or more or even 50% or more and up to 75% or even more than 90% or more, compared to binding of IL-6 to IL-6R in the absence of the amino acid sequence, Nanobody, polypeptide and preferably biparatopic (or multiparatopic) polypeptide of the invention or the composition comprising the same; and the amino acid sequence, Nanobody, polypeptide and preferably biparatopic (or multiparatopic) polypeptide of the invention or the composition comprising the same will preferably inhibit binding of Tocilizumab (MRA) to IL-6R by at least 1%, preferably at least 5%, such as at least 10%, for example 25% or more or even 50% or more and up to 75% or even more than 90% or more, compared to binding of Tocilizumab (MRA) to the IL-6R in the absence of the amino acid sequence, Nanobody, polypeptide and preferably biparatopic (or multiparatopic) polypeptide of the invention or the composition comprising the same.

[1151] In another aspect, the amino acid sequence, Nanobody, polypeptide and preferably biparatopic (or multiparatopic) polypeptide of the invention or the composition comprising the same will inhibit and/or block binding of IL-6 to IL-6R and binding of M182 to the IL-6R, preferably essentially simultaneously. The amino add sequence, Nanobody, polypeptide and preferably biparatopic (or multiparatopic) polypeptide of the invention or the composition comprising the same will preferably inhibit binding of IL-6 to IL-6R by at least 1%, preferably at least 5%, such as at least 10%, for example 25% or more or even 50% or more and up to 75% or even more than 90% or more, compared to binding of IL-6 to IL-6R in the absence of the amino acid sequence, Nanobody, polypeptide and preferably biparatopic (or multiparatopic) polypeptide of the invention or the composition comprising the same; and the amino acid sequence, Nanobody, polypeptide and preferably biparatopic (or multiparatopic) polypeptide of the invention or the composition comprising the same will preferably inhibit binding of M182 to IL-6R by at least 1%, preferably at least 5%, such as at least 10%, for example 25% or more or even 50% or more and up to 75% or even more than 90% or more, compared to binding of M182 to the IL-6R in the absence of the amino acid sequence, Nanobody, polypeptide and preferably biparatopic (or multiparatopic) polypeptide of the invention or the composition comprising the same.

[1152] In another aspect, the amino acid sequence, Nanobody, polypeptide and preferably biparatopic (or multiparatopic) polypeptide of the invention or the composition comprising the same will inhibit and/or block binding of IL-6 to IL-6R and binding of BN-12 to the IL-6R, preferably essentially simultaneously. The amino acid sequence, Nanobody, polypeptide and preferably biparatopic (or multiparatopic) polypeptide of the invention or the composition comprising the same will preferably inhibit binding of IL-6 to IL-6R by at least 1%, preferably at least 5%, such as at least 10%, for example 25% or more or even 50% or more and up to 75% or even more than 90% or more, compared to binding of IL-6 to IL-6R in the absence of the amino acid sequence, Nanobody, polypeptide and preferably biparatopic (or multiparatopic) polypeptide of the invention or the composition comprising the same; and the amino acid sequence, Nanobody, polypeptide and preferably biparatopic (or multiparatopic) polypeptide of the invention or the composition comprising the same will preferably inhibit binding of BN-12 to IL-6R by at least 1%, preferably at least 5%, such as at least 10%, for example 25% or more or even 50% or more and up to 75% or even more than 90% or more, compared to binding of BN-12 to the IL-6R in the absence of the amino acid sequence, Nanobody, polypeptide and preferably biparatopic (or multiparatopic) polypeptide of the invention or the composition comprising the same.

[1153] In another aspect, the amino acid sequence, Nanobody, polypeptide and preferably biparatopic (or multiparatopic) polypeptide of the invention or the composition comprising the same will inhibit and/or block binding of gp130 to the IL-6/IL-6R complex and binding of the reference IgG and/or reference Fab to IL-6R, preferably essentially simultaneously. The amino acid sequence, Nanobody, polypeptide and preferably biparatopic (or multiparatopic) polypeptide of the invention or the composition comprising the same will preferably inhibit binding of gp130 to the IL-6/IL-6R complex by at least 1%, preferably at least 5%, such as at least 10%, for example 25% or more or even 50% or more and up to 75% or even more than 90% or more, compared to binding of gp130 to the IL-6/IL-6R complex in the absence of the amino acid sequence, Nanobody, polypeptide and preferably biparatopic (or multiparatopic) polypeptide of the invention or the composition comprising the same; and the amino acid sequence, Nanobody, polypeptide and preferably biparatopic (or multiparatopic) polypeptide of the invention or the composition comprising the same will preferably inhibit binding of the reference IgG and/or Fab to IL-6R by at least 1%, preferably at least 5%, such as at least 10%, for example 25% or more or even 50% or more and up to 75% or even more than 90% or more, compared to binding of the reference IgG and/or Fab to IL-6R in the absence of the amino acid sequence, Nanobody, polypeptide and preferably biparatopic (or multiparatopic) polypeptide of the invention or the composition comprising the same.

[1154] In another aspect, the amino acid sequence, Nanobody, polypeptide and preferably biparatopic (or multiparatopic) polypeptide of the invention or the composition comprising the same will inhibit and/or block binding of gp130 to the IL-6/IL-6R complex and binding of Tocilizumab (MRA) to the IL-6R, preferably essentially simultaneously. The amino acid sequence, Nanobody, polypeptide and preferably biparatopic (or multiparatopic) polypeptide of the invention or the composition comprising the same will preferably inhibit binding of gp130 to the IL-6/IL-6R complex by at least 1%, preferably at least 5%, such as at least 10%, for example 25% or more or even 50% or more and up to 75% or even more than 90% or more, compared to binding of gp130 to the IL-6/IL-6R complex in the absence of the amino acid sequence, Nanobody, polypeptide and preferably biparatopic (or multiparatopic) polypeptide of the invention or the composition comprising the same; and the amino acid sequence, Nanobody, polypeptide and preferably biparatopic (or multiparatopic) polypeptide of the invention or the composition comprising the same will preferably inhibit binding of Tocilizumab (MRA) to IL-6R by at least 1%, preferably at least 5%, such as at least 10%, for example 25% or more or even 50% or more and up to 75% or even more than 90% or more, compared to binding of Tocilizumab (MRA) to the IL-6R in the absence of the amino acid sequence, Nanobody, polypeptide and preferably biparatopic (or multiparatopic) polypeptide of the invention or the composition comprising the same.

[1155] In another aspect, the amino acid sequence, Nanobody, polypeptide and preferably biparatopic (or multiparatopic) polypeptide of the invention or the composition comprising the same will inhibit and/or block binding of gp130 to the IL-6/IL-6R complex and binding of M182 to the IL-6R, preferably essentially simultaneously. The amino acid sequence, Nanobody, polypeptide and preferably biparatopic (or multiparatopic) polypeptide of the invention or the composition comprising the same will preferably inhibit binding of gp130 to the IL-6/IL-6R complex by at least 1%, preferably at least 5%, such as at least 10%, for example 25% or more or even 50% or more and up to 75% or even more than 90% or more, compared to binding of gp130 to the IL-6/IL-6R complex in the absence of the amino acid sequence, Nanobody, polypeptide and preferably biparatopic (or multiparatopic) polypeptide of the invention or the composition comprising the same; and the amino acid sequence, Nanobody, polypeptide and preferably biparatopic (or multiparatopic) polypeptide of the invention or the composition comprising the same will preferably inhibit binding of M182 to IL-6R by at least 1%, preferably at least 5%, such as at least 10%, for example 25% or more or even 50% or more and up to 75% or even more than 90% or more, compared to binding of M182 to the IL-6R in the absence of the amino acid sequence, Nanobody, polypeptide and preferably biparatopic (or multiparatopic) polypeptide of the invention or the composition comprising the same.

[1156] In another aspect, the amino acid sequence, Nanobody, polypeptide and preferably biparatopic (or multiparatopic) polypeptide of the invention or the composition comprising the same will inhibit and/or block binding of gp130 to the IL-6/IL-6R complex and binding of BN-12 to the IL-6R, preferably essentially simultaneously. The amino acid sequence, Nanobody, polypeptide and preferably biparatopic (or multiparatopic) polypeptide of the invention or the composition comprising the same will preferably inhibit binding of gp130 to the IL-6/IL-6R complex by at least 1%, preferably at least 5%, such as at least 10%, for example 25% or more or even 50% or more and up to 75% or even more than 90% or more, compared to binding of gp130 to the IL-6/IL-6R complex in the absence of the amino acid sequence, Nanobody, polypeptide and preferably biparatopic (or multiparatopic) polypeptide of the invention or the composition comprising the same; and the amino acid sequence, Nanobody, polypeptide and preferably biparatopic (or multiparatopic) polypeptide of the invention or the composition comprising the same will preferably inhibit binding of BN-12 to IL-6R by at least 1%, preferably at least 5%, such as at least 10%, for example 25% or more or even 50% or more and up to 75% or even more than 90% or more, compared to binding of BN-12 to the IL-6R in the absence of the amino acid sequence, Nanobody, polypeptide and preferably biparatopic (or multiparatopic) polypeptide of the invention or the composition comprising the same.

[1157] In another aspect, the amino acid sequence, Nanobody, polypeptide and preferably biparatopic (or multiparatopic) polypeptide of the invention or the composition comprising the same will inhibit and/or block binding of the reference IgG and/or the reference Fab to IL-6R and binding of Tocilizumab (MRA) to the IL-6R, preferably essentially simultaneously. The amino acid sequence, Nanobody, polypeptide and preferably biparatopic (or multiparatopic) polypeptide of the invention or the composition comprising the same will preferably inhibit binding of the reference IgG and/or the reference Fab to IL-6R by at least 1%, preferably at least 5%, such as at least 10%, for example 25% or more or even 50% or more and up to 75% or even more than 90% or more, compared to binding of the reference IgG and/or the reference Fab to IL-6R in the absence of the amino acid sequence, Nanobody, polypeptide and preferably biparatopic (or multiparatopic) polypeptide of the invention or the composition comprising the same; and the amino acid sequence, Nanobody, polypeptide and preferably biparatopic (or multiparatopic) polypeptide of the invention or the composition comprising the same will preferably inhibit binding of Tocilizumab (MRA) to IL-6R by at least 1%, preferably at least 5%, such as at least 10%, for example 25% or more or even 50% or more and up to 75% or even more than 90% or more, compared to binding of Tocilizumab (MRA) to the IL-6R in the absence of the amino acid sequence, Nanobody, polypeptide and preferably biparatopic (or multiparatopic) polypeptide of the invention or the composition comprising the same.

[1158] In another aspect, the amino acid sequence, Nanobody, polypeptide and preferably biparatopic (or multiparatopic) polypeptide of the invention or the composition comprising the same will inhibit and/or block binding of the reference IgG and/or the reference Fab to IL-6R and binding of M182 to the IL-6R, preferably essentially simultaneously. The amino acid sequence, Nanobody, polypeptide and preferably biparatopic (or multiparatopic) polypeptide of the invention or the composition comprising the same will preferably inhibit binding of the reference IgG and/or the reference Fab to IL-6R by at least 1%, preferably at least 5%, such as at least 10%, for example 25% or more or even 50% or more and up to 75% or even more than 90% or more, compared to binding of the reference IgG and/or the reference Fab to IL-6R in the absence of the amino acid sequence, Nanobody, polypeptide and preferably biparatopic (or multiparatopic) polypeptide of the invention or the composition comprising the same; and the amino acid sequence, Nanobody, polypeptide and preferably biparatopic (or multiparatopic) polypeptide of the invention or the composition comprising the same will preferably inhibit binding of M182 to IL-6R by at least 1%, preferably at least 5%, such as at least 10%, for example 25% or more or even 50% or more and up to 75% or even more than 90% or more, compared to binding of M182 to the IL-6R in the absence of the amino acid sequence, Nanobody, polypeptide and preferably biparatopic (or multiparatopic) polypeptide of the invention or the composition comprising the same.

[1159] In another aspect, the amino acid sequence, Nanobody, polypeptide and preferably biparatopic (or multiparatopic) polypeptide of the invention or the composition comprising the same will inhibit and/or block binding of the reference IgG and/or the reference Fab to IL-6R and binding of BN-12 to the IL-6R, preferably essentially simultaneously. The amino acid sequence, Nanobody, polypeptide and preferably biparatopic (or multiparatopic) polypeptide of the invention or the composition comprising the same will preferably inhibit binding of the reference IgG and/or the reference Fab to IL-6R by at least 1%, preferably at least 5%, such as at least 10%, for example 25% or more or even 50% or more and up to 75% or even more than 90% or more, compared to binding of the reference IgG and/or the reference Fab to IL-6R in the absence of the amino acid sequence, Nanobody, polypeptide and preferably biparatopic (or multiparatopic) polypeptide of the invention or the composition comprising the same; and the amino acid sequence, Nanobody, polypeptide and preferably biparatopic (or multiparatopic) polypeptide of the invention or the composition comprising the same will preferably inhibit binding of BN-12 to IL-6R by at least 1%, preferably at least 5%, such as at least 10%, for example 25% or more or even 50% or more and up to 75% or even more than 90% or more, compared to binding of BN-12 to the IL-6R in the absence of the amino acid sequence, Nanobody, polypeptide and preferably biparatopic (or multiparatopic) polypeptide of the invention or the composition comprising the same.

[1160] In another aspect, the amino acid sequence, Nanobody, polypeptide and preferably biparatopic (or multiparatopic) polypeptide of the invention or the composition comprising the same will inhibit and/or block binding of Tocilizumab (MRA) to IL-6R and binding of M182 to the IL-6R, preferably essentially simultaneously. The amino acid sequence, Nanobody, polypeptide and preferably biparatopic (or multiparatopic) polypeptide of the invention or the composition comprising the same will preferably inhibit binding of Tocilizumab (MRA) to IL-6R by at least 1%, preferably at least 5%, such as at least 10%, for example 25% or more or even 50% or more and up to 75% or even more than 90% or more, compared to binding of Tocilizumab (MRA) to IL-6R in the absence of the amino acid sequence, Nanobody, polypeptide and preferably biparatopic (or multiparatopic) polypeptide of the invention or the composition comprising the same; and the amino acid sequence, Nanobody, polypeptide and preferably biparatopic (or multiparatopic) polypeptide of the invention or the composition comprising the same will preferably inhibit binding of M182 to IL-6R by at least 1%, preferably at least 5%, such as at least 10%, for example 25% or more or even 50% or more and up to 75% or even more than 90% or more, compared to binding of M182 to the IL-6R in the absence of the amino acid sequence, Nanobody, polypeptide and preferably biparatopic (or multiparatopic) polypeptide of the invention or the composition comprising the same.

[1161] In another aspect, the amino acid sequence, Nanobody, polypeptide and preferably biparatopic (or multiparatopic) polypeptide of the invention or the composition comprising the same will inhibit and/or block binding of Tocilizumab (MRA) to IL-6R and binding of BN-12 to IL-6R, preferably essentially simultaneously. The amino acid sequence, Nanobody, polypeptide and preferably biparatopic (or multiparatopic) polypeptide of the invention or the composition comprising the same will preferably inhibit binding of Tocilizumab (MRA) to IL-6R by at least 1%, preferably at least 5%, such as at least 10%, for example 25% or more or even 50% or more and up to 75% or even more than 90% or more, compared to binding of Tocilizumab (MRA) to IL-6R in the absence of the amino acid sequence, Nanobody, polypeptide and preferably biparatopic (or multiparatopic) polypeptide of the invention or the composition comprising the same; and the amino acid sequence, Nanobody, polypeptide and preferably biparatopic (or multiparatopic) polypeptide of the invention or the composition comprising the same will preferably inhibit binding of BN-12 to IL-6R by at least 1%, preferably at least 5%, such as at least 10%, for example 25% or more or even 50% or more and up to 75% or even more than 90% or more, compared to binding of BN-12 to the IL-6R in the absence of the amino acid sequence, Nanobody, polypeptide and preferably biparatopic (or multiparatopic) polypeptide of the invention or the composition comprising the same.

[1162] In another aspect, the amino acid sequence, Nanobody, polypeptide and preferably biparatopic (or multiparatopic) polypeptide of the invention or the composition comprising the same will inhibit and/or block binding of BN-12 to IL-6R and binding of M182 to the IL-6R, preferably essentially simultaneously. The amino acid sequence, Nanobody, polypeptide and preferably biparatopic (or multiparatopic) polypeptide of the invention or the composition comprising the same will preferably inhibit binding of BN-12 to IL-6R by at least 1%, preferably at least 5%, such as at least 10%, for example 25% or more or even 50% or more and up to 75% or even more than 90% or more, compared to binding of BN-12 to IL-6R in the absence of the amino acid sequence, Nanobody, polypeptide and preferably biparatopic (or multiparatopic) polypeptide of the invention or the composition comprising the same; and the amino acid sequence, Nanobody, polypeptide and preferably biparatopic (or multiparatopic) polypeptide of the invention or the composition comprising the same will preferably inhibit binding of M182 to IL-6R by at least 1%, preferably at least 5%, such as at least 10%, for example 25% or more or even 50% or more and up to 75% or even more than 90% or more, compared to binding of M182 to the IL-6R in the absence of the amino acid sequence, Nanobody, polypeptide and preferably biparatopic (or multiparatopic) polypeptide of the invention or the composition comprising the same.

[1163] In another aspect, the amino acid sequence, Nanobody, polypeptide and preferably biparatopic (or multiparatopic) polypeptide of the invention or the composition comprising the same is an antagonist of IL-6R and will inhibit, decrease, downregulate and/or block signalling mediated by IL-6, IL-6R, the IL-6/IL-6R complex and/or gp130 and/or the pathway(s) and/or mechanism(s) in which

[1164] IL-6, IL-6R, the IL-6/IL-6R complex or gp130 are involved. The amino acid sequence, Nanobody, polypeptide and preferably biparatopic (or multiparatopic) polypeptide of the invention or the composition comprising the same will preferably inhibit, decrease, downregulate and/or block signalling of IL-6, IL-6R, the IL-6/IL-6R complex and/or gp130 and/or the pathway(s) and/or mechanism(s) in which IL-6, IL-6R, the IL-6/IL-6R complex or gp130 are involved by at least 1%, preferably at least 5%, such as at least 10%, for example 25% or more or even 50% or more and up to 75% or even more than 90% or more, compared to signalling mediated by IL-6, IL-6R, the IL-6/IL-6R complex and/or gp130 and/or the pathway(s) and/or mechanism(s) in which IL-6, IL-6R, the IL-6/IL-6R complex or gp130 are involved in the absence of the amino acid sequence, Nanobody, polypeptide and preferably biparatopic (or multiparatopic) polypeptide of the invention or the composition comprising the same. In a preferred aspect, the amino acid sequence, Nanobody, polypeptide and preferably biparatopic (or multiparatopic) polypeptide of the invention or the composition comprising the same will inhibit, decrease, downregulate and/or block signalling mediated by IL-6, IL-6R, the IL-6/IL-6R complex and/or gp130 and/or the pathway(s) and/or mechanism(s) in which IL-6, IL-6R, the IL-6/IL-6R complex or gp130 are involved equally or better than the reference IgG and/or the reference Fab. In another preferred aspect, the amino acid sequence, Nanobody, polypeptide and preferably biparatopic (or multiparatopic) polypeptide of the invention or the composition comprising the same will inhibit, decrease, downregulate and/or block signalling mediated by IL-6, IL-6R, the IL-6/IL-6R complex and/or gp130 and/or the pathway(s) and/or mechanism(s) in which IL-6, IL-6R, the IL-6/IL-6R complex or gp130 are involved equally or better than Tocilizumab (MRA). In another preferred aspect, the amino acid sequence, Nanobody, polypeptide and preferably biparatopic (or multiparatopic) polypeptide of the invention or the composition comprising the same will inhibit, decrease, downregulate and/or block signalling mediated by IL-6, IL-6R, the IL-6/IL-6R complex and/or gp130 and/or the pathway(s) and/or mechanism(s) in which IL-6, IL-6R, the IL-6/IL-6R complex or gp130 are involved equally or better than M182. In another preferred aspect, the amino acid sequence, Nanobody, polypeptide and preferably biparatopic (or multiparatopic) polypeptide of the invention or the composition comprising the same will inhibit, decrease, downregulate and/or block signalling mediated by IL-6, IL-6R, the IL-6/IL-6R complex and/or gp130 and/or the pathway(s) and/or mechanism(s) in which IL-6, IL-6R, the IL-6/IL-6R complex or gp130 are involved equally or better than Tocilizumab (MRA) and M182. In another preferred aspect, the amino acid sequence, Nanobody, polypeptide and preferably biparatopic (or multiparatopic) polypeptide of the invention or the composition comprising the same will inhibit, decrease, downregulate and/or block signalling mediated by IL-6, IL-6R, the IL-6/IL-6R complex and/or gp130 and/or the pathway(s) and/or mechanism(s) in which IL-6, IL-6R, the IL-6/IL-6R complex or gp130 are involved equally or better than the reference IgG and/or the reference Fab and than M182. In a preferred, but non-limiting aspect, a suitable antagonistic biparatopic (or multiparatopic) polypeptide of the invention is used, and more preferably one of the preferred biparatopic (or multiparatopic) polypeptides of the invention is used, as further described herein.

[1165] The amino acid sequences, Nanobodies, polypeptide and preferably biparatopic (or multiparatopic) polypeptides and compositions of the invention are also preferably (but without limitation) such that they effect a decrease (i.e. by at least 1 percent such as by at least 10 percent, preferably by at least 30 percent, more preferably by at least 50 percent, even more preferably by at least 75 percent or more) or a total inhibition of the induction of C-reactive protein (CRP) in a mammal (such as in a human subject or in a suitable animal model for inflammation such as the a cynomologus monkey) when they are administered to said mammal in a therapeutically relevant amount compared to a mammal not receiving the amino acid sequence, Nanobody, polypeptide and preferably biparatopic (or multiparatopic) polypeptide, compound or composition of the invention. Preferably, the amino acid sequences, Nanobodies, polypeptides and preferably biparatopic (or multiparatopic) polypeptides and compositions comprising the same are (but without limitation) such that they effect a decrease of the induction of C-reactive protein (CRP) in a mammal (such as in a human subject or in a suitable animal model for inflammation such as the a cynomologus monkey) that is the same or better (at least 5%, preferably at least 10%, more preferably at least 20%, even more preferably at least 30% or more, such as at least 50% or more) compared to the decrease effected by the reference IgG and/or the reference Fab when administered to said mammal in a therapeutically relevant amount. Preferably, the amino acid sequences, Nanobodies, polypeptides and preferably biparatopic (or multiparatopic) polypeptides and compositions comprising the same are (but without limitation) such that they effect a decrease of the induction of C-reactive protein (CRP) in a mammal (such as in a human subject or in a suitable animal model for inflammation such as the a cynomologus monkey) that is the same or better (at least 5%, preferably at least 10%, more preferably at least 20%, even more preferably at least 30% or more, such as at least 50% or more) compared to the decrease effected by Tocilizumab (MRA) when administered to said mammal in a therapeutically relevant amount. Preferably, the amino acid sequences, Nanobodies, polypeptides and preferably biparatopic (or multiparatopic) polypeptides and compositions comprising the same are (but without limitation) such that they effect a decrease of the induction of C-reactive protein (CRP) in a mammal (such as in a human subject or in a suitable animal model for inflammation such as the a cynomologus monkey) that is the same or better (at least 5%, preferably at least 10%, more preferably at least 20%, even more preferably at least 30% or more, such as at least 50% or more) compared to the decrease effected by M182 when administered to said mammal in a therapeutically relevant amount.

[1166] The amino acid sequences, Nanobodies, polypeptides and preferably biparatopic (or multiparatopic) polypeptides and compositions comprising the same are also preferably (but without limitation) such that they effect a decrease (i.e. by at least 1 percent such as by at least 10 percent, preferably by at least 30 percent, more preferably by at least 50 percent, even more preferably by at least 75 percent or more) or a total inhibition of the induction of the platelet count in a mammal (such as in a human subject or in a suitable animal model for inflammation such as the a cynomologus monkey) when they are administered to said mammal in a therapeutically relevant amount compared to a mammal not receiving the amino acid sequence, Nanobody, polypeptide and preferably biparatopic (or multiparatopic) polypeptide or compositions comprising the same. Preferably, the amino acid sequences, Nanobodies, polypeptides and preferably biparatopic (or multiparatopic) polypeptides and compositions comprising the same are (but without limitation) such that they effect a decrease of the induction of the platelet count in a mammal (such as in a human subject or in a suitable animal model for inflammation such as the a cynomologus monkey) that is the same or better (at least 5%, preferably at least 10%, more preferably at least 20%, even more preferably at least 30% or more, such as at least 50% or more) compared to the decrease effected by the reference IgG and/or the reference Fab when administered to said mammal in a therapeutically relevant amount. Preferably, the amino acid sequences, Nanobodies, polypeptides and preferably biparatopic (or multiparatopic) polypeptides and compositions comprising the same are (but without limitation) such that they effect a decrease of the induction of the platelet count in a mammal (such as in a human subject or in a suitable animal model for inflammation such as the a cynomologus monkey) that is the same or better (at least 5%, preferably at least 10%, more preferably at least 20%, even more preferably at least 30% or more, such as at least 50% or more) compared to the decrease effected by Tocilizumab (MRA) when administered to said mammal in a therapeutically relevant amount. Preferably, the amino acid sequences, Nanobodies, polypeptides and preferably biparatopic (or multiparatopic) polypeptides and compositions comprising the same are (but without limitation) such that they effect a decrease of the induction of the platelet count in a mammal (such as in a human subject or in a suitable animal model for inflammation such as the a cynomologus monkey) that is the same or better (at least 5%, preferably at least 10%, more preferably at least 20%, even more preferably at least 30% or more, such as at least 50% or more) compared to the decrease effected by M182 when administered to said mammal in a therapeutically relevant amount.

[1167] The amino acid sequences, Nanobodies, polypeptides and preferably biparatopic (or multiparatopic) polypeptides and compositions comprising the same are also preferably (but without limitation) such that they effect a decrease (i.e. by at least 1 percent such as by at least 10 percent, preferably by at least 30 percent, more preferably by at least 50 percent, even more preferably by at least 75 percent or more) or a total inhibition of the induction of fibrinogen in a mammal (such as in a human subject or in a suitable animal model for inflammation such as the cynomologus monkey) when they are administered to said mammal in a therapeutically relevant amount compared to a mammal not receiving the amino acid sequence, Nanobody, polypeptide and preferably biparatopic (or multiparatopic) polypeptide or compositions comprising the same. Preferably, the amino acid sequences, Nanobodies, polypeptides and preferably biparatopic (or multiparatopic) polypeptides and compositions comprising the same are (but without limitation) such that they effect a decrease of the induction of fibrinogen in a mammal (such as in a human subject or in a suitable animal model for inflammation such as the a cynomologus monkey) that is the same or better (at least 5%, preferably at least 10%, more preferably at least 20%, even more preferably at least 30% or more, such as at least 50% or more) compared to the decrease effected by the reference IgG and/or the reference Fab when administered to said mammal in a therapeutically relevant amount. Preferably, the amino acid sequences, Nanobodies, polypeptides and preferably biparatopic (or multiparatopic) polypeptides and compositions comprising the same are (but without limitation) such that they effect a decrease of the induction of fibrinogen in a mammal (such as in a human subject or in a suitable animal model for inflammation such as the a cynomologus monkey) that is the same or better (at least 5%, preferably at least 10%, more preferably at least 20%, even more preferably at least 30% or more, such as at least 50% or more) compared to the decrease effected by Tocilizumab (MRA) when administered to said mammal in a therapeutically relevant amount. Preferably, the amino acid sequences, Nanobodies, polypeptides and preferably biparatopic (or multiparatopic) polypeptides and compositions comprising the same are (but without limitation) such that they effect a decrease of the induction of the fibrinogen in a mammal (such as in a human subject or in a suitable animal model for inflammation such as the a cynomologus monkey) that is the same or better (at least 5%, preferably at least 10%, more preferably at least 20%, even more preferably at least 30% or more, such as at least 50% or more) compared to the decrease effected by M182 when administered to said mammal in a therapeutically relevant amount.

[1168] As such, the amino acid sequences, Nanobodies, compounds, constructs, polypeptides, and preferably biparatopic (or multiparatopic) polypeptides, and compositions of the invention can be used for the prevention and treatment of diseases and disorders associated with IL-6R, IL-6 and/or with the IL-6/IL-6R complex (optionally in further complex with gp130), and/or with the signaling pathway(s) and/or the biological functions and responses in which IL-6 and/or the IL-6/IL-6R complex (optionally in further complex with gp130) are involved, and in particular for the prevention and treatment of diseases and disorders associated with IL-6R, IL-6 and/or with the IL-6/IL-6R complex (optionally in further complex with gp130), and/or with the signaling pathway(s) and/or the biological functions and responses in which IL-6R, IL-6 and/or with the IL-6/IL-6R complex (optionally in further complex with gp130) are involved, which are characterized by excessive and/or unwanted signalling mediated by IL-6R or by the pathway(s) in which IL-6R is involved. Examples of such diseases and disorders associated with IL-6R, IL-6 and/or with the IL-6/IL-6R complex, and/or with the signaling pathway(s) and/or the biological functions and responses in which IL-6 and/or the IL-6/IL-6R complex are involved, will be clear to the skilled person based on the disclosure herein, and for example include the following diseases and disorders: sepsis (Starnes et al., 1999) and various forms of cancer such as multiple myeloma disease (MM), renal cell carcinoma (RCC), plasma cell leukaemia (Klein et al., 1991), lymphoma, B-lymphoproliferative disorder (BLPD) and prostate cancer. Non-limiting examples of other diseases caused by excessive IL-6 production or signalling include bone resorption (osteoporosis) (Roodman et al., 1992; Jilka et al., 1992), cachexia (Strassman et al., 1992), psoriasis, mesangial proliferative glomerulonephritis, Kaposi's sarcoma, AIDS-related lymphoma (Emilie et al., 1994), inflammatory diseases and disorder such as rheumatoid arthritis, systemic onset juvenile idiopathic arthritis, hypergammaglobulinemia (Grau et al., 1990); Crohn's disease, ulcerative colitis, systemic lupus erythematosus (SLE), multiple sclerosis, Castleman's disease, IgM gammopathy, cardiac myxoma, asthma (in particular allergic asthma) and autoimmune insulin-dependent diabetes mellitus (Campbell et al., 1991). Other IL-6R, IL-6 and/or IL-6/IL-6R complex related disorders will be clear to the skilled person. Such diseases and disorders are also generally referred to herein as “IL-6R related disorders”.

[1169] Thus, without being limited thereto, the amino acid sequences, Nanobodies, compounds, constructs, polypeptides, and preferably biparatopic (or multiparatopic) polypeptides, and compositions of the invention can for example be used to prevent and/or to treat all diseases and disorders that are currently being prevented or treated with active principles that can modulate IL-6R-mediated signalling, such as those mentioned in the prior art cited above. It is also envisaged that the polypeptides of the invention can be used to prevent and/or to treat all diseases and disorders for which treatment with such active principles is currently being developed, has been proposed, or will be proposed or developed in future. In addition, it is envisaged that, because of their favourable properties as further described herein, the polypeptides of the present invention may be used for the prevention and treatment of other diseases and disorders than those for which these known active principles are being used or will be proposed or developed; and/or that the polypeptides of the present invention may provide new methods and regimens for treating the diseases and disorders described herein.

[1170] Other applications and uses of the amino acid sequences, Nanobodies, compounds, constructs, polypeptides, and preferably biparatopic (or multiparatopic) polypeptides, and compositions of the invention will become clear to the skilled person from the further disclosure herein.

[1171] Generally, it is an object of the invention to provide pharmacologically active agents, as well as compositions comprising the same, that can be used in the diagnosis, prevention and/or treatment of one or more IL-6R related disorders (as defined herein); and to provide methods for the diagnosis, prevention and/or treatment of such diseases and disorders that involve the administration and/or use of such agents and compositions.

[1172] More in particular, it is an object of the invention to provide therapeutic proteins that can be used as pharmacologically active agents, as well as compositions comprising the same, for the diagnosis, prevention and/or treatment of one or more IL-6R related disorders (as defined herein); and to provide methods for the diagnosis, prevention and/or treatment of such diseases and disorders that involve the administration and/or the use of such therapeutic proteins and compositions.

[1173] Accordingly, it is a specific object of the present invention to provide amino acid sequences, Nanobodies, compounds, constructs, polypeptides, and preferably biparatopic (or multiparatopic) polypeptides that are directed against (as defined herein) IL-6R, in particular against IL-6R from a warm-blooded animal, more in particular against IL-6R from a mammal, and especially against human IL-6R; and to provide proteins and polypeptides comprising or essentially consisting of at least one such amino acid sequence, Nanobody, compound, construct, polypeptide, or preferably biparatopic (or multiparatopic) polypeptide.

[1174] In particular, it is a specific object of the present invention to provide such amino acid sequences, Nanobodies, compounds, constructs, polypeptides, and preferably biparatopic (or multiparatopic) polypeptides and such proteins and/or polypeptides that are suitable for prophylactic, therapeutic and/or diagnostic use in a warm-blooded animal, and in particular in a mammal, and more in particular in a human being.

[1175] More in particular, it is a specific object of the present invention to provide such amino acid sequences, Nanobodies, compounds, constructs, polypeptides, and preferably biparatopic (or multiparatopic) polypeptides and such proteins and/or polypeptides that can be used for the prevention, treatment, alleviation and/or diagnosis of one or more IL-6R related disorders (as defined herein) in a warm-blooded animal, in particular in a mammal, and more in particular in a human being.

[1176] It is also a specific object of the invention to provide such amino acid sequences, Nanobodies, compounds, constructs, polypeptides, and preferably biparatopic (or multiparatopic) polypeptides and such proteins and/or polypeptides that can be used in the preparation of pharmaceutical or veterinary compositions for the prevention and/or treatment of one or more IL-6R related disorders (as defined herein) in a warm-blooded animal, in particular in a mammal, and more in particular in a human being.

[1177] In the invention, generally, these objects are achieved by the use of the amino acid sequences, Nanobodies, compounds, constructs, polypeptides, and preferably biparatopic (or multiparatopic) polypeptides, and compositions that are described herein.

[1178] Generally, when an amino acid sequence (Nanobody, compound, construct, polypeptide, and preferably biparatopic (or multiparatopic) polypeptide, and composition comprising the same) is P5 intended for administration to a subject (for example for therapeutic and/or diagnostic purposes as described herein), it is preferably either an amino acid sequence that does not occur naturally in said subject; or, when it does occur naturally in said subject, in essentially isolated form (as defined herein).

[1179] It will also be clear to the skilled person that for pharmaceutical use, the amino acid sequences and/or Nanobodies of the invention (as well as compounds, constructs, polypeptides and preferably biparatopic (or multiparatopic) polypeptides comprising the same) are preferably directed against human IL-6R; whereas for veterinary purposes, the amino acid sequences and/or Nanobodies (as well as compounds, constructs, polypeptides and preferably biparatopic (or multiparatopic) polypeptides comprising the same) are preferably directed against IL-6R from the species to be treated, or at least cross-reactive with IL-6R from the species to be treated.

[1180] The efficacy of the amino acid sequences, Nanobodies, compounds, constructs, polypeptides, and preferably biparatopic (or multiparatopic) polypeptides, and compositions comprising the same, can be tested using any suitable in vitro assay, cell-based assay, in vivo assay and/or animal model known per se, or any combination thereof, depending on the specific disease or disorder involved. Suitable assays and animal models will be clear to the skilled person, and for example include proliferation assays using IL6-dependent cell lines including B9, XG1 and 7TD1, TF-1 assay as described by Kitamura et al. (1989, J. Cell Physiol. 140: 323), collagen induced arthritis model, transplant model of synovial tissue in SCID mice, xenograft models of various human cancers, including lymphoma, myeloma, prostate cancer and renal cell carcinoma, IBD models including TNBS, DSS and IL10 knockout models, primate models (such as e.g. described in Shinkura et al. 1998, Anticancer Research 18: 1217-1222), non-human primate models of arthritic disease (as e.g described in Vierboom et al., 2008, Drug Discov. Today: Dis Model doi:10.1016/j.ddmod.2008.06.003) as well as the assays and animal models used in the experimental part below and in the prior art cited herein (Peake et al., Rheumatology 2006; 45(12):1485-9; Wahid et al.; Clin Exp Immunol. 2000, 122:133-142; Matsuno et al., Arthritis and rheumatism, 1998, 41: 2014-2021).

[1181] For example, in the TF-1 assay as described by Kitamura et al. (1989, J. Cell Physiol. 140: 323), the amino acid sequences, Nanobodies and/or polypeptides of the invention and/or the compositions comprising the same may have IC50 values (at 100 IU/mL IL-6) between 10 nM and 50 μM, preferably between 5 nM and 50 μM, more preferably between 1 nM and 50 μM or less, such as about 750 or 500 μM or less. In this TF-1 assay the amino acid sequences, Nanobodies and/or polypeptides of the invention and/or the compositions comprising the same may have IC50 values (at 5000 IU/mL IL-6) between 50 nM and 1 nM, preferably between 25 nM and 1 nM, more preferably between 10 nM and 1 nM or less, such as about 8 nM or less. In this TF-1 assay, the amino acid sequences, Nanobodies and/or polypeptides of the invention and/or the compositions comprising the same may have IC50 values that are at least the same and preferably better or lower, at least two times, preferably three times, more preferably four times, even more preferably 5 times, 7 times or more than 7 times better or lower compared to the IC50 value obtained for the reference IgG as defined by SEQ ID NO's: 126 and 127 or the reference Fab as defined by SEQ ID NO's: 128 and 129 (see Example 1). In this TF-1 assay, the amino acid sequences, Nanobodies and/or polypeptides of the invention and/or the compositions comprising the same may have IC50 values that are at least the same and preferably better or lower, at least two times, preferably three times, more preferably four times, even more preferably 5 times, 7 times or more than 7 times better or lower compared to the IC50 value obtained for Tocilizumab (MRA).

[1182] In another aspect, the invention relates to a method for the prevention and/or treatment of at least one IL-6R related disease or disorder, said method comprising administering, to a subject in need thereof, a pharmaceutically active amount of an amino acid sequence of the invention, of a Nanobody of the invention, of a polypeptide of the invention, and/or of a pharmaceutical composition comprising the same.

[1183] In the context of the present invention, the term “prevention and/or treatment” not only comprises preventing and/or treating the disease, but also generally comprises preventing the onset of the disease, slowing or reversing the progress of disease, preventing or slowing the onset of one or more symptoms associated with the disease, reducing and/or alleviating one or more symptoms associated with the disease, reducing the severity and/or the duration of the disease and/or of any symptoms associated therewith and/or preventing a further increase in the severity of the disease and/or of any symptoms associated therewith, preventing, reducing or reversing any physiological damage caused by the disease, and generally any pharmacological action that is beneficial to the patient being treated.

[1184] The subject to be treated may be any warm-blooded animal, but is in particular a mammal, and more in particular a human being. As will be clear to the skilled person, the subject to be treated will in particular be a person suffering from, or at risk of, the diseases and disorders mentioned herein.

[1185] The invention relates to a method for the prevention and/or treatment of at least one disease or disorder that is associated with IL-6R, with its biological or pharmacological activity, and/or with the biological pathways or signalling in which IL-6R is involved, said method comprising administering, to a subject in need thereof, a pharmaceutically active amount of an amino acid sequence of the invention, of a Nanobody of the invention, of a polypeptide of the invention, and/or of a pharmaceutical composition comprising the same. In particular, the invention relates to a method for the prevention and/or treatment of at least one disease or disorder that can be treated by modulating IL-6R, its biological or pharmacological activity, and/or the biological pathways or signalling in which IL-6R is involved, said method comprising administering, to a subject in need thereof, a pharmaceutically active amount of an amino acid sequence of the invention, of a Nanobody of the invention, of a polypeptide of the invention, and/or of a pharmaceutical composition comprising the same. In particular, said pharmaceutically effective amount may be an amount that is sufficient to modulate IL-6R, its biological or pharmacological activity, and/or the biological pathways or signalling in which IL-6R is involved; and/or an amount that provides a level of the amino acid sequence of the invention, of a Nanobody of the invention, of a polypeptide of the invention in the circulation that is sufficient to modulate IL-6R, its biological or pharmacological activity, and/or the biological pathways or signalling in which IL-6R is involved.

[1186] The invention furthermore relates to a method for the prevention and/or treatment of at least one disease or disorder that can be prevented and/or treated by administering an amino acid sequence of the invention, a Nanobody of the invention or a polypeptide of the invention to a patient, said method comprising administering, to a subject in need thereof, a pharmaceutically active amount of an amino acid sequence of the invention, of a Nanobody of the invention, of a polypeptide of the invention, and/or of a pharmaceutical composition comprising the same.

[1187] More in particular, the invention relates to a method for the prevention and/or treatment of at least one disease or disorder chosen from the group consisting of the diseases and disorders listed herein, said method comprising administering, to a subject in need thereof, a pharmaceutically active amount of an amino acid sequence of the invention, of a Nanobody of the invention, of a polypeptide of the invention, and/or of a pharmaceutical composition comprising the same.

[1188] In another aspect, the invention relates to a method for immunotherapy, and in particular for passive immunotherapy, which method comprises administering, to a subject suffering from or at risk of the diseases and disorders mentioned herein, a pharmaceutically active amount of an amino acid sequence of the invention, of a Nanobody of the invention, of a polypeptide of the invention, and/or of a pharmaceutical composition comprising the same.

[1189] In the above methods, the amino acid sequences, Nanobodies and/or polypeptides of the invention and/or the compositions comprising the same can be administered in any suitable manner, depending on the specific pharmaceutical formulation or composition to be used. Thus, the amino acid sequences, Nanobodies and/or polypeptides of the invention and/or the compositions comprising the same can for example be administered orally, intraperitoneally (e.g. intravenously, subcutaneously, intramuscularly, or via any other route of administration that circumvents the gastrointestinal tract), intranasally, transdermally, topically, by means of a suppository, by inhalation, again depending on the specific pharmaceutical formulation or composition to be used. The clinician will be able to select a suitable route of administration and a suitable pharmaceutical formulation or composition to be used in such administration, depending on the disease or disorder to be prevented or treated and other factors well known to the clinician.

[1190] The amino acid sequences, Nanobodies and/or polypeptides of the invention and/or the compositions comprising the same are administered according to a regime of treatment that is suitable for preventing and/or treating the disease or disorder to be prevented or treated. The clinician will generally be able to determine a suitable treatment regimen, depending on factors such as the disease or disorder to be prevented or treated, the severity of the disease to be treated and/or the severity of the symptoms thereof, the specific amino acid sequence, Nanobody or polypeptide of the invention to be used, the specific route of administration and pharmaceutical formulation or composition to be used, the age, gender, weight, diet, general condition of the patient, and similar factors well known to the clinician.

[1191] Generally, the treatment regimen will comprise the administration of one or more amino acid sequences, Nanobodies and/or polypeptides of the invention, or of one or more compositions comprising the same, in one or more pharmaceutically effective amounts or doses. The specific amount(s) or doses to administered can be determined by the clinician, again based on the factors cited above.

[1192] Generally, for the prevention and/or treatment of the diseases and disorders mentioned herein and depending on the specific disease or disorder to be treated, the potency of the specific amino acid sequence, Nanobody and polypeptide of the invention to be used, the specific route of administration and the specific pharmaceutical formulation or composition used, the amino acid sequences, Nanobodies and polypeptides of the invention will generally be administered in an amount between 1 gram and 0.01 microgram per kg body weight per day, preferably between 0.1 gram and 0.1 microgram per kg body weight per day, such as about 1, 10, 100 or 1000 microgram per kg body weight per day, either continuously (e.g. by infusion), as a single daily dose or as multiple divided doses during the day. The clinician will generally be able to determine a suitable daily dose, depending on the factors mentioned herein. It will also be clear that in specific cases, the clinician may choose to deviate from these amounts, for example on the basis of the factors cited above and his expert judgment. Generally, some guidance on the amounts to be administered can be obtained from the amounts usually administered for comparable conventional antibodies or antibody fragments against the same target administered via essentially the same route, taking into account however differences in affinity/avidity, efficacy, biodistribution, half-life and similar factors well known to the skilled person.

[1193] Usually, in the above method, a single amino acid sequence, Nanobody or polypeptide of the invention will be used. It is however within the scope of the invention to use two or more amino acid sequences, Nanobodies and/or polypeptides of the invention in combination.

[1194] The Nanobodies, amino acid sequences and polypeptides of the invention may also be used in combination with one or more further pharmaceutically active compounds or principles, i.e. as a combined treatment regimen, which may or may not lead to a synergistic effect. Again, the clinician will be able to select such further compounds or principles, as well as a suitable combined treatment regimen, based on the factors cited above and his expert judgement.

[1195] In particular, the amino acid sequences, Nanobodies and polypeptides of the invention may be used in combination with other pharmaceutically active compounds or principles that are or can be used for the prevention and/or treatment of the diseases and disorders cited herein, as a result of which a synergistic effect may or may not be obtained. Examples of such compounds and principles, as well as routes, methods and pharmaceutical formulations or compositions for administering them will be clear to the clinician.

[1196] When two or more substances or principles are to be used as part of a combined treatment regimen, they can be administered via the same route of administration or via different routes of administration, at essentially the same time or at different times (e.g. essentially simultaneously, consecutively, or according to an alternating regime). When the substances or principles are to be administered simultaneously via the same route of administration, they may be administered as different pharmaceutical formulations or compositions or part of a combined pharmaceutical formulation or composition, as will be clear to the skilled person.

[1197] Also, when two or more active substances or principles are to be used as part of a combined treatment regimen, each of the substances or principles may be administered in the same amount and according to the same regimen as used when the compound or principle is used on its own, and such combined use may or may not lead to a synergistic effect. However, when the combined use of the two or more active substances or principles leads to a synergistic effect, it may also be possible to reduce the amount of one, more or all of the substances or principles to be administered, while still achieving the desired therapeutic action. This may for example be useful for avoiding, limiting or reducing any unwanted side-effects that are associated with the use of one or more of the substances or principles when they are used in their usual amounts, while still obtaining the desired pharmaceutical or therapeutic effect.

[1198] The effectiveness of the treatment regimen used according to the invention may be determined and/or followed in any manner known per se for the disease or disorder involved, as will be clear to the clinician. The clinician will also be able, where appropriate and on a ease-by-case basis, to change or modify a particular treatment regimen, so as to achieve the desired therapeutic effect, to avoid, limit or reduce unwanted side-effects, and/or to achieve an appropriate balance between achieving the desired therapeutic effect on the one hand and avoiding, limiting or reducing undesired side effects on the other hand.

[1199] Generally, the treatment regimen will be followed until the desired therapeutic effect is achieved and/or for as long as the desired therapeutic effect is to be maintained. Again, this can be determined by the clinician.

[1200] In another aspect, the invention relates to the use of an amino acid sequence, Nanobody or polypeptide of the invention in the preparation of a pharmaceutical composition for prevention and/or treatment of at least one IL-6R related disease or disorder; and/or for use in one or more of the methods of treatment mentioned herein.

[1201] The subject to be treated may be any warm-blooded animal, but is in particular a mammal, and more in particular a human being. As will be clear to the skilled person, the subject to be treated will in particular be a person suffering from, or at risk of, the diseases and disorders mentioned herein.

[1202] The invention also relates to the use of an amino acid sequence, Nanobody or polypeptide of the invention in the preparation of a pharmaceutical composition for the prevention and/or treatment of at least one disease or disorder that can be prevented and/or treated by administering an amino acid sequence, Nanobody or polypeptide of the invention to a patient.

[1203] More in particular, the invention relates to the use of an amino acid sequence, Nanobody or polypeptide of the invention in the preparation of a pharmaceutical composition for the prevention and/or treatment of an IL-6R related disease or disorder, and in particular for the prevention and treatment of one or more of the diseases and disorders listed herein.

[1204] Again, in such a pharmaceutical composition, the one or more amino acid sequences, Nanobodies or polypeptides of the invention may also be suitably combined with one or more other active principles, such as those mentioned herein.

[1205] Finally, although the use of the Nanobodies of the invention (as defined herein) and of the polypeptides of the invention is much preferred, it will be clear that on the basis of the description herein, the skilled person will also be able to design and/or generate, in an analogous manner, other amino acid sequences and in particular (single) domain antibodies against IL-6R, as well as polypeptides comprising such (single) domain antibodies.

[1206] For example, it will also be clear to the skilled person that it may be possible to “graft” one or more of the CDR's mentioned above for the Nanobodies of the invention onto such (single) domain antibodies or other protein scaffolds, including but not limited to human scaffolds or non-immunoglobulin scaffolds. Suitable scaffolds and techniques for such CDR grafting will be clear to the skilled person and are well known in the art, see for example those mentioned in WO 08/020,079. For example, techniques known per se for grafting mouse or rat CDR's onto human frameworks and scaffolds can be used in an analogous manner to provide chimeric proteins comprising one or more of the CDR's of the Nanobodies of the invention and one or more human framework regions or sequences.

[1207] It should also be noted that, when the Nanobodies of the inventions contain one or more other CDR sequences than the preferred CDR sequences mentioned above, these CDR sequences can be obtained in any manner known per se, for example using one or more of the techniques described in WO 08/020,079.

[1208] Further uses of the amino acid sequences, Nanobodies, polypeptides, nucleic acids, genetic constructs and hosts and host cells of the invention will be clear to the skilled person based on the disclosure herein. For example, and without limitation, the amino acid sequences of the invention can be linked to a suitable carrier or solid support so as to provide a medium than can be used in a manner known per se to purify IL-6R from compositions and preparations comprising the same. Derivatives of the amino acid sequences of the invention that comprise a suitable detectable label can also be used as markers to determine (qualitatively or quantitatively) the presence of IL-6R in a composition or preparation or as a marker to selectively detect the presence of IL-6R on the surface of a cell or tissue (for example, in combination with suitable cell sorting techniques).

[1209] The entire contents of all of the references (including literature references, issued patents, published patent applications, and co-pending patent applications) cited throughout this application are hereby expressly incorporated by reference, in particular for the teaching that is referenced hereinabove. The invention will now be further described by means of the following non-limiting preferred aspects, examples and figures.

### Aspects

[1210] 1. Polypeptide that is directed against and/or can specifically bind IL-6R, which is a multiparatopic polypeptide.
[1211] 2. Polypeptide according to aspect 1, which is a biparatopic polypeptide.
[1212] 3. Polypeptide according to any of aspects 1 or 2, which comprises at least one amino acid sequence directed against a first antigenic determinant, epitope, part or domain of IL-6R and at least one amino acid sequence directed against a second antigenic determinant, epitope, part or domain of IL-6R different from the first antigenic determinant, epitope, part or domain, optionally linked via a suitable linker.
[1213] 4. Biparatopic polypeptide according to aspect 3, which is capable of simultaneously binding to said first antigenic determinant, epitope, part or domain of IL-6R and to said second antigenic determinant, epitope, part or domain of IL-6R.
[1214] 5. Polypeptide according to any of aspects 1 to 4, wherein said polypeptide is directed against the IL-6 binding site on IL-6R.
[1215] 6. Polypeptide according to any of aspects 1 to 5, wherein said polypeptide competes with IL-6 for binding to IL-6R.
[1216] 7. Polypeptide according to any of aspects 1 to 6, wherein said polypeptide inhibits and/or blocks binding of IL-6 to IL-6R.
[1217] 8. Polypeptide according to any of aspects 1 to 7, wherein said polypeptide specifically binds one or more of the 18 contact residues as described in Boulanger et al. 2003 (Science 300: 2101-2104) present in the extracellular 03 domain of the IL-6R.
[1218] 9. Polypeptide according to any of aspects 1 to 8, wherein said polypeptide specifically binds amino acid residues Phe229 and Phe279 present in the extracellular D3 domain of the IL-6R.
[1219] 10. Polypeptide according to any of aspects 1 to 9, wherein said polypeptide is directed against the gp130 binding site on IL-6R and/or the IL-6/IL-6R complex.
[1220] 11. Polypeptide according to any of aspects 1 to 10, wherein said polypeptide competes with gp130 for binding to the IL-6/IL-6R complex.
[1221] 12. Polypeptide according to any of aspects 1 to 11, wherein said polypeptide inhibits and/or blocks binding of gp130 to the IL-6/IL-6R complex.
[1222] 13. Polypeptide according to any of aspects 1 to 12, wherein said polypeptide is directed against the Tocilizumab (MRA) binding site on IL-6R.
[1223] 14. Polypeptide according to any of aspects 1 to 13, wherein said polypeptide competes with Tocilizumab (MRA) for binding to IL-6R.
[1224] 15. Polypeptide according to any of aspects 1 to 14, wherein said polypeptide inhibits and/or blocks binding of Tocilizumab (MRA) to IL-6R.
[1225] 16. Polypeptide according to any of aspects 1 to 15, wherein said polypeptide is directed against the binding site for the reference IgG or the reference Fab on IL-6R.
[1226] 17. Polypeptide according to any of aspects 1 to 16, wherein said polypeptide competes with the reference IgG or the reference Fab for binding to IL-6R.
[1227] 18. Polypeptide according to any of aspects 1 to 17, wherein said polypeptide inhibits and/or blocks binding of the reference IgG or the reference Fab to IL-6R.
[1228] 19. Polypeptide according to any of aspects 1 to 18, wherein said polypeptide is directed against the M182 binding site on IL-6R.
[1229] 20. Polypeptide according to any of aspects 1 to 19, wherein said polypeptide competes with M182 for binding to IL-6R.
[1230] 21. Polypeptide according to any of aspects 1 to 20, wherein said polypeptide inhibits and/or blocks binding of M182 to IL-6R.
[1231] 22. Polypeptide according to any of aspects 1 to 21, wherein said polypeptide is directed against the BN-12 binding site on IL-6R.
[1232] 23. Polypeptide according to any of aspects 1 to 22, wherein said polypeptide competes with BN-12 for binding to IL-6R.
[1233] 24. Polypeptide according to any of aspects 1 to 23, wherein said polypeptide inhibits and/or blocks binding of BN-12 to IL-6R.
[1234] 25. Biparatopic polypeptide according to any of aspects 1 to 4, which can simultaneously bind the IL-6 binding site on IL-6R and another antigenic determinant or epitope in the D1 domain on IL-6 R.
[1235] 26. Biparatopic polypeptide according to any of aspects 1 to 4, which can simultaneously bind the IL-6 binding site on IL-6R and another antigenic determinant or epitope in the D2 domain on IL-6R.
[1236] 27. Biparatopic polypeptide according to any of aspects 1 to 4, which can simultaneously bind the IL-6 binding site on IL-6R and another antigenic determinant or epitope in the D3 domain on IL-6R.
[1237] 28. Biparatopic polypeptide according to any of aspects 1 to 4, which can simultaneously bind the gp130 binding site on IL-6R and/or the IL-6/IL-6R complex and another antigenic determinant or epitope in the D1 domain on IL-6R.
[1238] 29. Biparatopic polypeptide according to any of aspects 1 to 4, which can simultaneously bind the gp130 binding site on IL-6R and/or the IL-6/IL-6R complex and another antigenic determinant or epitope in the D2 domain on IL-6R.
[1239] 30. Biparatopic polypeptide according to any of aspects 1 to 4, which can simultaneously bind the gp130 binding site on IL-6R and/or the IL-6/IL-6R complex and another antigenic determinant or epitope in the D3 domain on IL-6R.
[1240] 31. Biparatopic polypeptide according to any of aspects 1 to 4, which can simultaneously bind the Tocilizumab (MRA) binding site on IL-6R and another antigenic determinant or epitope in the D1 domain on IL-6R.
[1241] 32. Biparatopic polypeptide according to any of aspects 1 to 4, which can simultaneously bind the Tocilizumab (MRA) binding site on IL-6R and another antigenic determinant or epitope in the D2 domain on IL-6R.
[1242] 33. Biparatopic polypeptide according to any of aspects 1 to 4, which can simultaneously bind the Tocilizumab (MRA) binding site on IL-6R and another antigenic determinant or epitope in the 03 domain on IL-6R.
[1243] 34. Biparatopic polypeptide according to any of aspects 1 to 4, which can simultaneously bind the binding site for the reference IgG and the reference Fab on IL-6R and another antigenic determinant or epitope in the D1 domain on IL-6R.
[1244] 35. Biparatopic polypeptide according to any of aspects 1 to 4, which can simultaneously bind the binding site for the reference IgG and the reference Fab on IL-6R and another antigenic determinant or epitope in the D2 domain on IL-6R.
[1245] 36. Biparatopic polypeptide according to any of aspects 1 to 4, which can simultaneously bind the binding site for the reference IgG and the reference Fab on IL-6R and another antigenic determinant or epitope in the D3 domain on IL-6R.
[1246] 37. Biparatopic polypeptide according to any of aspects 1 to 4, which can simultaneously bind the M182 binding site on IL-6R and another antigenic determinant or epitope in the D1 domain on IL-6R.
[1247] 38. Biparatopic polypeptide according to any of aspects 1 to 4, which can simultaneously bind the M182 binding site on IL-6R and another antigenic determinant or epitope in the D2 domain on IL-6R.
[1248] 39. Biparatopic polypeptide according to any of aspects 1 to 4, which can simultaneously bind the M182 binding site on IL-6R and another antigenic determinant or epitope in the D3 domain on IL-6R.
[1249] 40. Biparatopic polypeptide according to any of aspects 1 to 4, which can simultaneously bind the BN-12 binding site on IL-6R and another antigenic determinant or epitope in the D1 domain on IL-6R.
[1250] 41. Biparatopic polypeptide according to any of aspects 1 to 4, which can simultaneously bind the BN-12 binding site on IL-6R and another antigenic determinant or epitope in the D2 domain on IL-6R.
[1251] 42. Biparatopic polypeptide according to any of aspects 1 to 4, which can simultaneously bind the BN-12 binding site on IL-6R and another antigenic determinant or epitope in the D3 domain on IL-6R.
[1252] 43. Biparatopic polypeptide according to any of aspects 1 to 4, which has both paratopes directed against the IL-6 binding site on IL-6R.
[1253] 44. Biparatopic polypeptide according to any of aspects 1 to 4, which can simultaneously bind the IL-6 binding site on IL-6R and one or more of the 18 contact residues as described in Boulanger et al. 2003 (Science 300: 2101-2104) present in the extracellular D3 domain of the IL-6R.
[1254] 45. Biparatopic polypeptide according to any of aspects 1 to 4, which can simultaneously bind the IL-6 binding site on IL-6R and amino acid residues Phe229 and Phe279 present in the extracellular D3 domain of the IL-6R.
[1255] 46. Polypeptide according to any of aspects 1 to 4, wherein said polypeptide is directed against the IL-6 binding site on IL-6R and against the binding site for the reference IgG and the reference Fab on IL-6R.
[1256] 47. Polypeptide according to any of aspects 1 to 4, wherein said polypeptide competes with IL-6 for binding to IL-6R and competes with the reference IgG and the reference Fab for binding to IL-6R.
[1257] 48. Biparatopic polypeptide according to any of aspects 1 to 4, which can simultaneously bind the IL-6 binding site on IL-6R and the binding site for the reference IgG and the reference Fab on IL-6R.
[1258] 49. Polypeptide according to any of aspects 1 to 4, wherein said polypeptide is directed against the IL-6 binding site on IL-6R and against the Tocilizumab (MRA) binding site on IL-6R.
[1259] 50. Polypeptide according to any of aspects 1 to 4, wherein said polypeptide competes with IL-6 for binding to IL-6R and competes with Tocilizumab (MRA) for binding to IL-6R.
[1260] 51. Biparatopic polypeptide according to any of aspects 1 to 4, which can simultaneously bind the IL-6 binding site on IL-6R and the Tocilizumab (MRA) binding site on IL-6R.
[1261] 52. Biparatopic polypeptide according to any of aspects 1 to 4, which has both paratopes directed against the gp130 binding site on IL-6R and/or the IL-6/IL-6R complex.
[1262] 53. Polypeptide according to any of aspects 1 to 4, wherein said polypeptide is directed against the M182 binding site on IL-6R and against the gp130 binding site on IL-6R and/or the IL-6/IL-6R complex.
[1263] 54. Polypeptide according to any of aspects 1 to 4, wherein said polypeptide competes with M182 for binding to IL-6R and competes with gp130 for binding to the IL-6R/IL-6R complex.
[1264] 55. Biparatopic polypeptide according to any of aspects 1 to 4, which can simultaneously bind the M182 binding site on IL-6R and the gp130 binding site on IL-6R and/or the IL-6/IL-6R complex.
[1265] 56. Biparatopic polypeptide according to any of aspects 1 to 4, which has both paratopes directed against the Tocilizumab (MRA) binding site on IL-6R.
[1266] 57. Biparatopic polypeptide according to any of aspects 1 to 4, which has both paratopes directed against the binding site for the reference IgG and the reference Fab on IL-6R.
[1267] 58. Biparatopic polypeptide according to any of aspects 1 to 4, which has both paratopes directed against the M182 binding site on IL-6R.
[1268] 59. Biparatopic polypeptide according to any of aspects 1 to 4, which has both paratopes directed against the BN-12 binding site on IL-6R.
[1269] 60. Polypeptide according to any of aspects 1 to 4, wherein said polypeptide is directed against the IL-6 binding site on IL-6R and against the gp130 binding site on IL-6R and/or the IL-6/IL-6R complex.
[1270] 61. Polypeptide according to any of aspects 1 to 4, wherein said polypeptide competes with IL-6 for binding to IL-6R and competes with gp130 for binding to the IL-6R/IL-6R complex.
[1271] 62. Biparatopic polypeptide according to any of aspects 1 to 4, which can simultaneously bind the IL-6 binding site on IL-6R and the gp130 binding site on IL-6R and/or the IL-6/IL-6R complex.
[1272] 63. Polypeptide according to any of aspects 1 to 4, wherein said polypeptide is directed against the binding site for the reference IgG and the reference Fab on IL-6R and against the gp130 binding site on IL-6R and/or the IL-6/IL-6R complex.
[1273] 64. Polypeptide according to any of aspects 1 to 4, wherein said polypeptide competes with the reference IgG and the reference Fab for binding to IL-6R and competes with gp130 for binding to the IL-6R/IL-6R complex.
[1274] 65. Biparatopic polypeptide according to any of aspects 1 to 4, which can simultaneously bind the binding site for the reference IgG and the reference Fab on IL-6R and the gp130 binding site on IL-6R and/or the IL-6/IL-6R complex.
[1275] 66. Polypeptide according to any of aspects 1 to 4, wherein said polypeptide is directed against the IL-6 binding site on IL-6R and against the M182 binding site on IL-6R.
[1276] 67. Polypeptide according to any of aspects 1 to 4, wherein said polypeptide competes with IL-6 for binding to IL-6R and competes with M182 for binding to IL-6R.
[1277] 68. Biparatopic polypeptide according to any of aspects 1 to 4, which can simultaneously bind the IL-6 binding site on IL-6R and the M182 binding site on IL-6R.
[1278] 69. Polypeptide according to any of aspects 1 to 4, wherein said polypeptide is directed against the IL-6 binding site on IL-6R and against the BN-12 binding site on IL-6R.
[1279] 70. Polypeptide according to any of aspects 1 to 4, wherein said polypeptide competes with IL-6 for binding to IL-6R and competes with BN-12 for binding to IL-6R.
[1280] 71. Biparatopic polypeptide according to any of aspects 1 to 4, which can simultaneously bind the IL-6 binding site on IL-6R and the BN-12 binding site on IL-6R.
[1281] 72. Polypeptide according to any of aspects 1 to 4, wherein said polypeptide is directed against the Tocilizumab (MRA) binding site on IL-6R and against the gp130 binding site on IL-6R and/or the IL-6/IL-6R complex.
[1282] 73. Polypeptide according to any of aspects 1 to 4, wherein said polypeptide competes with Tocilizumab (MRA) for binding to IL-6R and competes with gp130 for binding to the IL-6/IL-6R complex.
[1283] 74. Biparatopic polypeptide according to any of aspects 1 to 4, which can simultaneously bind the Tocilizumab (MRA) binding site on IL-6R and the gp130 binding site on IL-6R and/or the IL-6/IL-6R complex.
[1284] 75. Polypeptide according to any of aspects 1 to 4, wherein said polypeptide is directed against the Tocilizumab (MRA) binding site on IL-6R and against the M182 binding site on IL-6R.
[1285] 76. Polypeptide according to any of aspects 1 to 4, wherein said polypeptide competes with Tocilizumab (MRA) for binding to IL-6R and competes with M182 for binding to IL-6R.
[1286] 77. Biparatopic polypeptide according to any of aspects 1 to 4, which can simultaneously bind the Tocilizumab (MRA) binding site on IL-6R and the M182 binding site on IL-6R.
[1287] 78. Polypeptide according to any of aspects 1 to 4, wherein said polypeptide is directed against the Tocilizumab (MRA) binding site on IL-6R and against the BN-12 binding site on IL-6R.
[1288] 79. Polypeptide according to any of aspects 1 to 4, wherein said polypeptide competes with Tocilizumab (MRA) for binding to IL-6R and competes with BN-12 for binding to IL-6R.
[1289] 80. Biparatopic polypeptide according to any of aspects 1 to 4, which can simultaneously bind the Tocilizumab (MRA) binding site on IL-6R and the BN-12 binding site on IL-6R.
[1290] 81. Polypeptide according to any of aspects 1 to 4, wherein said polypeptide is directed against the binding site for the reference IgG and the reference Fab on IL-6R and against the gp130 binding site on IL-6R and/or the IL-6/IL-6R complex.
[1291] 82. Polypeptide according to any of aspects 1 to 4, wherein said polypeptide competes with the reference IgG and the reference Fab for binding to IL-6R and competes with gp130 for binding to the IL-6/IL-6R complex.
[1292] 83. Biparatopic polypeptide according to any of aspects 1 to 4, which can simultaneously bind the binding site for the reference IgG and the reference Fab on IL-6R and the gp130 binding site on IL-6R and/or the IL-6/IL-6R complex.
[1293] 84. Polypeptide according to any of aspects 1 to 4, wherein said polypeptide is directed against the binding site for the reference IgG and the reference Fab on IL-6R and against the M182 binding site on IL-6R.
[1294] 85. Polypeptide according to any of aspects 1 to 4, wherein said polypeptide competes with the reference IgG and the reference Fab for binding to IL-6R and competes with M182 for binding to IL-6R.
[1295] 86. Biparatopic polypeptide according to any of aspects 1 to 4, which can simultaneously bind the binding site for the reference IgG and the reference Fab on IL-6R and the M182 binding site on IL-6R.
[1296] 87. Polypeptide according to any of aspects 1 to 4, wherein said polypeptide is directed against the binding site for the reference IgG and the reference Fab on IL-6R and against the BN-12 binding site on IL-6R.
[1297] 88. Polypeptide according to any of aspects 1 to 4, wherein said polypeptide competes with the reference IgG and the reference Fab for binding to IL-6R and competes with BN-12 for binding to IL-6R.
[1298] 89. Biparatopic polypeptide according to any of aspects 1 to 4, which can simultaneously bind the binding site for the reference IgG and the reference Fab on IL-6R and the BN-12 binding site on IL-6R.
[1299] 90. Polypeptide according to any of aspects 1 to 4, wherein said polypeptide is directed against the BN-12 binding site on IL-6R and against the gp130 binding site on IL-6R and/or the IL-6/IL-6R complex.
[1300] 91. Polypeptide according to any of aspects 1 to 4, wherein said polypeptide competes with BN-12 for binding to IL-6R and competes with gp130 for binding to IL-6R and/or the IL-6/IL-6R complex.
[1301] 92. Biparatopic polypeptide according to any of aspects 1 to 4, which can simultaneously bind the BN-12 binding site on IL-6R and the gp130 binding site on IL-6R and/or the IL-6/IL-6R complex.
[1302] 93, Polypeptide according to any of aspects 1 to 4, wherein said polypeptide is directed against the BN-12 binding site on IL-6R and against the M182 binding site on IL-6R.
[1303] 94. Polypeptide according to any of aspects 1 to 4, wherein said polypeptide competes with BN-12 for binding to IL-6R and competes with M182 for binding to IL-6R.
[1304] 95. Biparatopic polypeptide according to any of aspects 1 to 4, which can simultaneously bind the BN-12 binding site on IL-6R and the M182 binding site on IL-6R.
[1305] 96. Polypeptide according to any of aspects 1 to 95, which combines two or more different modes of action each mediated by one of its binding units, wherein each binding unit binds at a different binding site of IL-6R.
[1306] 97. Polypeptide according to any of aspects 1 to 96, wherein said polypeptide inhibit or affects (e.g. fully or partially disrupts) the formation of the IL-6/IL-6R complex in such a way that the signalling, pathway(s) and/or mechanism(s) induced/mediated by the binding of IL-6 to IL-6R is modulated (e.g. reduced) compared to the signalling, pathway(s) and/or mechanism(s) induced/mediated by the binding of IL-6 to IL-6R without the presence of said polypeptide.
[1307] 98. Polypeptide according to any of aspects 1 to 97, wherein said polypeptide inhibits or affects (e.g. fully or partially disrupts) the formation of the IL-6/IL-6R complex is in such a way that the signalling, pathway(s) and/or mechanism(s) induced/mediated by the binding of the complex to gp130 is modulated (e.g. reduced) compared to the signalling, pathway(s) and/or mechanism(s) induced/mediated by the binding of the complex to gp130 without the presence of said polypeptide.
[1308] 99. Polypeptide according to any of aspects 1 to 98, wherein said polypeptide modulates (e.g. inhibit) the binding of the IL-6/IL-6R complex to gp130, so that the signalling, pathway(s) and/or mechanism(s) induced/mediated by the binding of the IL-6/IL-6R complex to gp130 is modulated (e.g. reduced) compared to the signalling, pathway(s) and/or mechanism(s) induced/mediated by the binding of the IL-6/IL-6R complex to gp130 without the presence of said polypeptide.
[1309] 100. Polypeptide according to any of aspects 1 to 99, wherein said polypeptide inhibits or affects (e.g. fully or partially disrupts) the formation of the IL-6/IL-6R complex in such a way that the signalling, pathway(s) and/or mechanism(s) induced/mediated by the binding of IL-6 to IL-6R is modulated (e.g. reduced) compared to the signalling, pathway(s) and/or mechanism(s) induced/mediated by the binding of IL-6 to IL-6R without the presence of said polypeptide; and in such a way that the signalling, pathway(s) and/or mechanism(s) induced/mediated by the binding of the complex to gp130 is modulated (e.g. reduced) compared to the signalling, pathway(s) and/or mechanism(s) induced/mediated by the binding of the complex to gp130 without the presence of said polypeptide.
[1310] 101. Polypeptide according to any of aspects 1 to 99, wherein said polypeptide inhibits or affects (e.g. fully or partially disrupts) the formation of the IL-6/IL-6R complex in such a way that the signalling, pathway(s) and/or mechanism(s) induced/mediated by the binding of IL-6 to IL-6R is modulated (e.g. reduced) compared to the signalling, pathway(s) and/or mechanism(s) induced/mediated by the binding of IL-6 to IL-6R without the presence of said polypeptide; and wherein said compound or construct modulates (e.g. inhibit) the binding of the IL-6/IL-6R complex to gp130 in such a way that the signalling, pathway(s) and/or mechanism(s) induced/mediated by the binding of the IL-6/IL-6R complex to gp130 is modulated (e.g. reduced) compared to the signalling, pathway(s) and/or mechanism(s) induced/mediated by the binding of the IL-6/IL-6R complex to gp130 without the presence of said polypeptide.
[1311] 102. Polypeptide according to any of aspects 1 to 99, wherein said polypeptide inhibits or affects (e.g. fully or partially disrupts) the formation of the IL-6/IL-6R complex and wherein said polypeptide modulates (e.g. inhibit) the binding of the IL-6/IL-6R complex to gp130 in such a way that the signalling, pathway(s) and/or mechanism(s) induced/mediated by the binding of the complex to gp130 is modulated (e.g. reduced) compared to the signalling, pathway(s) and/or mechanism(s) induced/mediated by the binding of the complex to gp130 without the presence of said polypeptide.
[1312] 103. Polypeptide according to any of aspects 1 to 24, wherein said polypeptide modulates IL-6R or IL-6R mediated signalling via the same mechanism of action as Tocilizumab (MRA).
[1313] 104. Polypeptide according to any of aspects 1 to 24, wherein said polypeptide modulates IL-6R or IL-6R mediated signalling via the same mechanism of action as the reference IgG and the reference Fab.
[1314] 105. Polypeptide according to any of aspects 1 to 24, wherein said polypeptide modulates IL-6R or IL-6R mediated signalling via the same mechanism of action as M182.
[1315] 106. Polypeptide according to any of aspects 1 to 4, wherein said polypeptide modulates IL-6R or IL-6R mediated signalling via the same mechanism of action as Tocilizumab (MRA) and via the same mechanism of action as M182.
[1316] 107. Polypeptide according to any of aspects 1 to 4, wherein said polypeptide modulates IL-6R or IL-6R mediated signalling via the same mechanism of action as the reference IgG and the reference Fab and via the same mechanism of action as M182.
[1317] 108. Polypeptide according to any of aspects 1 to 107, which comprises or essentially consists of amino acid sequences that are chosen from the group consisting of domain antibodies, amino acid sequences that are suitable for use as a domain antibody, single domain antibodies, amino acid sequences that are suitable for use as a single domain antibody, “dAb”'s, amino acid sequences that are suitable for use as a dAb, or Nanobodies.
[1318] 109. Polypeptide according to any of aspects 1 to 4, wherein the first amino acid sequence or Nanobody is directed against the IL-6 binding site on IL-6R and/or is an amino acid sequence or Nanobody that is capable of competing with IL-6 for binding to IL-6R.
[1319] 110. Polypeptide according to any of aspects 1 to 4, wherein the first amino acid sequence or Nanobody is directed against the gp130 binding site on IL-6R and/or the IL-6/IL-6R complex and/or is an amino acid sequence or Nanobody that is capable of competing with gp130 for binding to the IL-6/IL-6R complex.
[1320] 111. Polypeptide according to any of aspects 1 to 4, wherein the first amino acid sequence or Nanobody is directed against the Tocilizumab (MRA) binding site on IL-6R and/or is an amino acid sequence or Nanobody that is capable of competing with Tocilizumab (MRA) for binding to IL-6R.
[1321] 112. Polypeptide according to any of aspects 1 to 4, wherein the first amino acid sequence or Nanobody is directed against the binding site for the reference IgG and the reference Fab on IL-6R and/or is an amino acid sequence or Nanobody that is capable of competing with the reference IgG and the reference Fab for binding to IL-6R.
[1322] 113. Polypeptide according to any of aspects 1 to 4, wherein the first amino acid sequence or Nanobody is directed against the M182 binding site on IL-6R and/or is an amino acid sequence or Nanobody that is capable of competing with M182 for binding to IL-6R.
[1323] 114. Polypeptide according to any of aspects 1 to 4, wherein the first amino acid sequence or Nanobody is directed against the BN-12 binding site on IL-6R and/or is an amino acid sequence or Nanobody that is capable of competing with BN-12 for binding to IL-6R.
[1324] 115. Polypeptide according to any of aspects 1 to 4, wherein the first amino acid sequence or Nanobody is directed against the IL-6 binding site on IL-6R and/or is an amino acid sequence or Nanobody that is capable of competing with IL-6 for binding to IL-6R and the second amino acid sequence or Nanobody is directed against the gp130 binding site on IL-6R and/or the IL-6/IL-6R complex and/or is an amino acid sequence or Nanobody that is capable of competing with gp130 for binding to the IL-6/IL-6R complex (or visa versa).
[1325] 116. Polypeptide according to any of aspects 1 to 4, wherein the first amino acid sequence or Nanobody is directed against the IL-6 binding site on IL-6R and/or is an amino acid sequence or Nanobody that is capable of competing with IL-6 for binding to IL-6R and the second amino acid sequence or Nanobody is directed against the M182 binding site on IL-6R and/or is an amino acid sequence or Nanobody that is capable of competing with M182 for binding to the IL-6R (or visa versa).
[1326] 117. Polypeptide according to any of aspects 1 to 4, wherein the first amino acid sequence or Nanobody is directed against the IL-6 binding site on IL-6R and/or is an amino acid sequence or Nanobody that is capable of competing with IL-6 for binding to IL-6R and the second amino acid sequence or Nanobody is directed against the BN-12 binding site on IL-6R and/or is an amino acid sequence or Nanobody that is capable of competing with BN-12 for binding to the IL-6R (or visa versa).
[1327] 118. Polypeptide according to any of aspects 1 to 4, wherein the first amino acid sequence or Nanobody is directed against the Tocilizumab (MRA) binding site on IL-6R and/or is an amino acid sequence or Nanobody that is capable of competing with Tocilizumab (MRA) for binding to IL-6R and the second amino acid sequence or Nanobody is directed against the gp130 binding site on IL-6R and/or the IL-6/IL-6R complex and/or is an amino acid sequence or Nanobody that is capable of competing with gp130 for binding to the IL-6/IL-6R complex (or visa versa).
[1328] 119. Polypeptide according to any of aspects 1 to 4, wherein the first amino acid sequence or Nanobody is directed against the Tocilizumab (MRA) binding site on IL-6R and/or is an amino acid sequence or Nanobody that is capable of competing with Tocilizumab (MRA) for binding to IL-6R and the second amino acid sequence or Nanobody is directed against the M182 binding site on IL-6R and/or is an amino acid sequence or Nanobody that is capable of competing with M182 for binding to the IL-6R (or visa versa).
[1329] 120. Polypeptide according to any of aspects 1 to 4, wherein the first amino acid sequence or Nanobody is directed against the Tocilizumab (MM) binding site on IL-6R and/or is an amino acid sequence or Nanobody that is capable of competing with Tocilizumab (MRA) for binding to IL-6R and the second amino acid sequence or Nanobody is directed against the BN-12 binding site on IL-6R and/or is an amino acid sequence or Nanobody that is capable of competing with BN-12 for binding to the IL-6R (or visa versa).
[1330] 121. Polypeptide according to any of aspects 1 to 4, wherein the first amino acid sequence or Nanobody is directed against the binding site for the reference IgG and the reference Fab on IL-BR and/or is an amino acid sequence or Nanobody that is capable of competing with the reference IgG and the reference Fab for binding to IL-6R and the second amino acid sequence or Nanobody is directed against the gp130 binding site on IL-6R and/or the IL-6/IL-6R complex and/or is an amino acid sequence or Nanobody that is capable of competing with gp130 for binding to the IL-6/IL-6R complex (or visa versa).
[1331] 122. Polypeptide according to any of aspects 1 to 4, wherein the first amino acid sequence or Nanobody is directed against the binding site for the reference IgG and the reference Fab on IL-6R and/or is an amino acid sequence or Nanobody that is capable of competing with the reference IgG and the reference Fab for binding to IL-6R and the second amino acid sequence or Nanobody is directed against the M182 binding site on IL-6R and/or is an amino acid sequence or Nanobody that is capable of competing with M182 for binding to the IL-6R (or visa versa).
[1332] 123. Polypeptide according to any of aspects 1 to 4, wherein the first amino acid sequence or Nanobody is directed against the binding site for the reference IgG and the reference Fab on IL-6R and/or is an amino acid sequence or Nanobody that is capable of competing with the reference IgG and the reference Fab for binding to IL-6R and the second amino acid sequence or Nanobody is directed against the BN-12 binding site on IL-6R and/or is an amino acid sequence or Nanobody that is capable of competing with BN-12 for binding to the IL-6R (or visa versa).
[1333] 124. Polypeptide according to any of aspects 1 to 4, wherein the first amino acid sequence or Nanobody is directed against the BN-12 binding site on IL-6R and/or is an amino acid sequence or Nanobody that is capable of competing with BN-12 for binding to IL-6R and the second amino acid sequence or Nanobody is directed against the gp130 binding site on IL-6R and/or the IL-6/IL-6R complex and/or is an amino acid sequence or Nanobody that is capable of competing with gp130 for binding to the IL-6/IL-6R complex (or visa versa).
[1334] 125. Polypeptide according to any of aspects 1 to 4, wherein the first amino acid sequence or Nanobody is directed against the BN-12 binding site on IL-6R and/or is an amino acid sequence or Nanobody that is capable of competing with BN-12 for binding to IL-6R and the second amino acid sequence or Nanobody is directed against the M182 binding site on IL-6R and/or is an amino acid sequence or Nanobody that is capable of competing with M182 for binding to IL-6R (or visa versa).
[1335] 126. Polypeptide according to any of aspects 1 to 4, wherein the first amino acid sequence or Nanobody is an amino acid sequence according to any of aspects 133 to 186 or Nanobody according to any of aspects 187 to 197 and/or is an amino acid sequence or Nanobody that is capable of competing with an amino acid sequence according to any of aspects 133 to 186 or Nanobody according to any of aspects 187 to 197.
[1336] 127. Polypeptide according to any of aspects 1 to 4, wherein the second amino acid sequence or Nanobody is an amino acid sequence according to any of aspects 133 to 186 or Nanobody according to any of aspects 187 to 197 and/or is an amino acid sequence or Nanobody that is capable of competing with an amino acid sequence according to any of aspects 133 to 186 or Nanobody according to any of aspects 187 to 197.
[1337] 128. Polypeptide according to any of aspects 1 to 4, wherein the first amino acid sequence or Nanobody is an amino acid sequence according to any of aspects 133 to 186 or Nanobody according to any of aspects 187 to 197 and/or is an amino acid sequence or Nanobody that is capable of competing with an amino acid sequence according to any of aspects 133 to 186 or Nanobody according to any of aspects 187 to 197 and the second amino acid sequence or Nanobody is an amino acid sequence according to any of aspects 133 to 186 or Nanobody according to any of aspects 187 to 197 and/or is an amino acid sequence or Nanobody that is capable of competing with an amino acid sequence according to any of aspects s 133 to 186 or Nanobody according to any of aspects 187 to 197.
[1338] 129. Polypeptide according to any of aspects 1 to 4, wherein the first amino acid sequence or Nanobody is chosen from the groups consisting of SEQ ID NO's: 132-216 or from the group consisting of amino acid sequences that have more than 80%, preferably more than 90%, more preferably more than 95%, such as 99% or more sequence identity (as defined herein) with at least one of the amino acid sequences of SEQ ID NO's: 132-216 and/or is an amino acid sequence or Nanobody that is capable of competing with an amino acid sequence or Nanobody chosen from the groups consisting of SEQ ID NO's: 132-216 for binding to IL-6R.
[1339] 130. Polypeptide according to any of aspects 1 to 4, wherein the second amino acid sequence or Nanobody is chosen from the groups consisting of SEQ ID NO's: 132-216 or from the group consisting of amino acid sequences that have more than 80%, preferably more than 90%, more preferably more than 95%, such as 99% or more sequence identity (as defined herein) with at least one of the amino acid sequences of SEQ ID NO's: 132-216 and/or is an amino acid sequence or Nanobody that is capable of competing with an amino acid sequence or Nanobody chosen from the groups consisting of SEQ ID NO's: 132-216 for binding to IL-6R.
[1340] 131. Polypeptide according to any of aspects 1 to 4, wherein the first amino add sequence or Nanobody is chosen from the groups consisting of SEQ ID NO's: 132-216 or from the group consisting of amino acid sequences that have more than 80%, preferably more than 90%, more preferably more than 95%, such as 99% or more sequence identity (as defined herein) with at least one of the amino acid sequences of SEQ ID NO's: 132-216 and/or is an amino acid sequence or Nanobody that is capable of competing with an amino acid sequence or Nanobody chosen from the groups consisting of SEQ ID NO's: 132-216 for binding to IL-6R; and the second amino acid sequence or Nanobody is chosen from the groups consisting of SEQ ID NO's: 132-216 or from the group consisting of amino acid sequences that have more than 80%, preferably more than 90%, more preferably more than 95%, such as 99% or more sequence identity (as defined herein) with at least one of the amino acid sequences of SEQ ID NO's: 132-216 and/or is an amino acid sequence or Nanobody that is capable of competing with an amino acid sequence or Nanobody chosen from the groups consisting of SEQ ID NO's: 132-216 for binding to IL-6R.
[1341] 132. Polypeptide according to any of aspects 1 to 4, that comprises, essentially consists of, or that is chosen from the group consisting of SEQ ID NO's: 812-947 or from the group consisting of amino acid sequences that have more than 80%, preferably more than 90%, more preferably more than 95%, such as 99% or more sequence identity (as defined herein) with at least one of the amino acid sequences of SEQ ID NO's: 812-947.
[1342] 133. An amino acid sequence that is directed against and/or that can specifically bind IL-6R, and that comprises one or more stretches of amino acid residues chosen from the group consisting of:
   [1343] a) the amino acid sequences of SEQ ID NO's: 302-386;
   [1344] b) amino acid sequences that have at least 80% amino acid identity with at least one of the amino acid sequences of SEQ ID NO's: 302-386;
   [1345] c) amino acid sequences that have 3, 2, or 1 amino acid difference with at least one of the amino acid sequences of SEQ ID NO's: 302-386;
   [1346] d) the amino acid sequences of SEQ ID NO's: 472-556;
   [1347] e) amino acid sequences that have at least 80% amino acid identity with at least one of the amino acid sequences of SEQ ID NO's: 472-556;
   [1348] f) amino acid sequences that have 3, 2, or 1 amino acid difference with at least one of the amino acid sequences of SEQ ID NO's: 472-556;
   [1349] g) the amino acid sequences of SEQ ID NO's: 642-726;
   [1350] h) amino acid sequences that have at least 80% amino acid identity with at least one of the amino acid sequences of SEQ ID NO's: 642-726;
   [1351] i) amino acid sequences that have 3, 2, or 1 amino acid difference with at least one of the amino acid sequences of SEQ ID NO's: 642-726; or any suitable combination thereof.
[1352] 134. An amino acid sequence according to aspect 133, in which at least one of said stretches of amino acid residues forms part of the antigen binding site for binding against IL-6R,
[1353] 135. An amino acid sequence according to any of aspects 133 or 134 that is directed against and/or that can specifically bind IL-6R and that comprises two or more stretches of amino acid residues chosen from the group consisting of:
   [1354] a) the amino acid sequences of SEQ ID NO's: 302-386;
   [1355] b) amino acid sequences that have at least 80% amino acid identity with at least one of the amino acid sequences of SEQ ID NO's: 302-386;
   [1356] c) amino acid sequences that have 3, 2, or 1 amino acid difference with at least one of the amino acid sequences of SEQ ID NO's: 302-386;
   [1357] d) the amino acid sequences of SEQ ID NO's: 472-556;
   [1358] e) amino acid sequences that have at least 80% amino acid identity with at least one of the amino acid sequences of SEQ ID NO's: 472-556;
   [1359] f) amino acid sequences that have 3, 2, or 1 amino acid difference with at least one of the amino acid sequences of SEQ ID NO's: 472-556;
   [1360] g) the amino acid sequences of SEQ ID NO's: 642-726;
   [1361] h) amino acid sequences that have at least 80% amino acid identity with at least one of the amino acid sequences of SEQ ID NO's: 642-726;
   [1362] i) amino acid sequences that have 3, 2, or 1 amino acid difference with at least one of the amino acid sequences of SEQ ID NO's: 642-726;
      such that (i) when the first stretch of amino acid residues corresponds to one of the amino acid sequences according to a), b) or c), the second stretch of amino acid residues corresponds to one of the amino acid sequences according to d), e), f), g), h) or 1); (ii) when the first stretch of amino acid residues corresponds to one of the amino acid sequences according to d), e) or f), the second stretch of amino acid residues corresponds to one of the amino acid sequences according to a), b), c), g), h) or i); or (iii) when the first stretch of amino acid residues corresponds to one of the amino acid sequences according to g), h) or i), the second stretch of amino acid residues corresponds to one of the amino acid sequences according to a), b), c), d), e) or f).
[1363] 136. An amino acid sequence according to aspect 135, in which the at least two stretches of amino acid residues forms part of the antigen binding site for binding against IL-6R.
[1364] 137. An amino acid sequence according to any of aspects 133-136 that is directed against and/or that can specifically bind IL-6R and that comprises three or more stretches of amino acid residues, in which the first stretch of amino acid residues is chosen from the group consisting of:
   [1365] a) the amino acid sequences of SEQ ID NO's: 302-386;
   [1366] b) amino acid sequences that have at least 80% amino acid identity with at least one of the amino acid sequences of SEQ ID NO's: 302-386;
   [1367] c) amino acid sequences that have 3, 2, or 1 amino acid difference with at least one of the amino acid sequences of SEQ ID NO's: 302-386; the second stretch of amino acid residues is chosen from the group consisting of:
   [1368] d) the amino acid sequences of SEQ ID NO's: 472-556;
   [1369] e) amino acid sequences that have at least 80% amino acid identity with at least one of the amino acid sequences of SEQ ID NO's: 472-556;
   [1370] f) amino acid sequences that have 3, 2, or 1 amino acid difference with at least one of the amino acid sequences of SEQ ID NO's: 472-556; and the third stretch of amino acid residues is chosen from the group consisting of:
   [1371] g) the amino acid sequences of SEQ ID NO's: 642-726;
   [1372] h) amino acid sequences that have at least 80% amino acid identity with at least one of the amino acid sequences of SEQ ID NO's: 642-726;
   [1373] i) amino acid sequences that have 3, 2, or 1 amino acid difference with at least one of the amino acid sequences of SEQ ID NO's: 642-726.
[1374] 138. An amino acid sequence according to aspect 137, in which the at least three stretches of amino acid residues forms part of the antigen binding site for binding against IL-6R.
[1375] 139. An amino acid sequence that is directed against and/or that can specifically bind IL-6R in which the CDR sequences of said amino acid sequence have at least 70% amino acid identity, preferably at least 80% amino acid identity, more preferably at least 90% amino acid identity, such as 95% amino acid identity or more or even essentially 100% amino acid identity with the CDR sequences of at least one of the amino acid sequences of SEQ ID NO's: 132-216. Such an amino acid sequence may in particular be an amino acid sequence according to any of the aspects 133-138.
[1376] 140. An amino acid sequence that is directed against IL-6R and that cross-blocks the binding of at least one of the amino acid sequences of SEQ ID NO's: 132-216 to IL-6R. Such an amino acid sequence may in particular be an amino acid sequence according to any of the aspects 133-139. Also, preferably, such an amino acid sequence is able to specifically bind to IL-6R.
[1377] 141. An amino acid sequence that is directed against IL-6R and that is cross-blocked from binding to IL-6R by at least one of the amino acid sequences of SEQ ID NO's: 132-216. Such an amino acid sequence may in particular be an amino acid sequence according to any of the aspects 133-140. Also, preferably, such an amino acid sequence is able to specifically bind to IL-6R.
[1378] 142. An amino acid sequence according to any of aspects 140 or 141, wherein the ability of said amino acid sequence to cross-block or to be cross-blocked is detected in a Biacore assay.
[1379] 143. An amino acid sequence according to any of aspects 140 to 142 wherein the ability of said amino acid sequence to cross-block or to be cross-blocked is detected in an ELISA assay.
[1380] 144. An amino acid sequence according to any of aspects 133 to 143, that is in essentially isolated form.
[1381] 145. An amino acid sequence according to any of aspects 133 to 144 for administration to a subject, wherein said amino acid sequence does not naturally occur in said subject.
[1382] 146. An amino acid sequence according to any of aspects 133 to 145 that can specifically bind to IL-6R with a dissociation constant (K_{D}) of 10⁻⁵ to 10⁻¹² moles/litre or less, and preferably 10⁻⁷ to 10⁻¹² moles/litre or less and more preferably 10⁻⁸ to 10⁻¹² moles/litre.
[1383] 147. An amino acid sequence according to any of aspects 133 to 146 that can specifically bind to IL-6R with a rate of association (kₒₙ-rate) of between 10² M⁻¹s⁻¹ to about 10⁷ M⁻¹s⁻¹, preferably between 10³ M⁻¹s⁻¹ and 10⁷ M⁻¹s⁻¹, more preferably between 10⁴ M⁻¹s⁻¹ and 10⁷ M⁻¹s⁻¹, such as between 10⁵ M⁻¹s⁻¹ and 10⁷ M⁻¹s⁻¹.
[1384] 148. An amino acid sequence according to any of aspects 133 to 147 that can specifically bind to IL-6R with a rate of dissociation (k_{off} rate) between 1 s⁻¹ and 10⁻⁶ s⁻¹ preferably between 10⁻² s⁻¹ and 10⁻⁶ s⁻¹, more preferably between 10⁻³ s⁻¹ and 10⁻⁶ s⁻¹, such as between 10⁻⁴ s⁻¹ and 10⁻⁶ s⁻¹ .
[1385] 149. An amino acid sequence according to any of aspects 133 to 148 that can specifically bind to IL 6R with an affinity less than 500 nM, preferably less than 200 nM, more preferably less than 10 nM, such as less than 500 μM.
[1386] 150. An amino acid sequence according to any of aspects 133 to 149, that is a naturally occurring amino acid sequence (from any suitable species) or a synthetic or semi-synthetic amino acid sequence.
[1387] 151. An amino acid sequence according to any of aspects 133 to 150 that comprises an immunoglobulin fold or that under suitable conditions is capable of forming an immunoglobulin fold.
[1388] 152. An amino acid sequence according to any of aspects 133 to 151, that is an immunoglobulin sequence.
[1389] 153. An amino acid sequence according to any of aspects 133 to 152, that is a naturally occurring immunoglobulin sequence (from any suitable species) or a synthetic or semi-synthetic immunoglobulin sequence.
[1390] 154. An amino acid sequence according to any of aspects 133 to 153 that is a humanized immunoglobulin sequence, a camelized immunoglobulin sequence or an immunoglobulin sequence that has been obtained by techniques such as affinity maturation.
[1391] 155. An amino acid sequence according to any of aspects 133 to 154 that essentially consists of a light chain variable domain sequence (e.g. a V_{L}-sequence); or of a heavy chain variable domain sequence (e.g. a Vₛ-sequence).
[1392] 156. An amino acid sequence according to any of aspects 133 to 155, that essentially consists of a heavy chain variable domain sequence that is derived from a conventional four-chain antibody or that essentially consist of a heavy chain variable domain sequence that is derived from heavy chain antibody.
[1393] 157. An amino acid sequence according to any of aspects 133 to 156, that essentially consists of a domain antibody (or an amino acid sequence that is suitable for use as a domain antibody), of a single domain antibody (or an amino acid sequence that is suitable for use as a single domain antibody), of a “dAb” (or an amino acid sequence that is suitable for use as a dAb) or of a Nanobody (including but not limited to a V_{HH} sequence).
[1394] 158. An amino acid sequence according to any of aspects 133 to 157 that essentially consists of a Nanobody.
[1395] 159. An amino acid sequence according to any of aspects 133 to 158 that essentially consists of a Nanobody that
   [1396] i) has at least 80% amino acid identity with at least one of the amino acid sequences of SEQ ID NO's: 1 to 22, in which for the purposes of determining the degree of amino acid identity, the amino acid residues that form the CDR sequences are disregarded; and in which:
   [1397] ii) preferably one or more of the amino acid residues at positions 11, 37, 44, 45, 47, 83, 84, 103, 104 and 108 according to the Kabat numbering are chosen from the Hallmark residues mentioned in Table B-2.
[1398] 160. An amino acid sequence according to any of aspects 133 to 159, that essentially consists of a Nanobody that
   [1399] i) has at least 80% amino acid identity with at least one of the amino acid sequences of SEQ ID NO's: 132-216, in which for the purposes of determining the degree of amino acid identity, the amino acid residues that form the CDR sequences are disregarded; and in which:
   [1400] ii) preferably one or more of the amino acid residues at positions 11, 37, 44, 45, 47, 83, 84, 103, 104 and 108 according to the Kabat numbering are chosen from the Hallmark residues mentioned in Table B-2.
[1401] 161. An amino acid sequence according to any of aspects 133 to 160 that essentially consists of a humanized Nanobody.
[1402] 162. An amino acid sequence that essentially consists of 4 framework regions (ER1 to FR4, respectively) and 3 complementarity determining regions (CDR1 to CDR3, respectively), in which:
   [1403] CDR1 is chosen from the group consisting of:
      [1404] a) the amino acid sequences of SEQ ID NO's: 302-386;
      [1405] b) amino acid sequences that have at least 80% amino acid identity with at least one of the amino acid sequences of SEQ ID NO's: 302-386;
      [1406] c) amino acid sequences that have 3, 2, or 1 amino acid difference with at least one of the amino acid sequences of SEQ ID NO's: 302-386;
   [1407] and/or
   [1408] CDR2 is chosen from the group consisting of:
      [1409] d) the amino acid sequences of SEQ ID NO's: 472-556;
      [1410] e) amino acid sequences that have at least 80% amino acid identity with at least one of the amino acid sequences of SEQ ID NO's: 472-556;
      [1411] f) amino acid sequences that have 3, 2, or 1 amino acid difference with at least one of the amino acid sequences of SEQ ID NO's: 472-556;
   [1412] and/or
   [1413] CDR3 is chosen from the group consisting of:
      [1414] g) the amino acid sequences of SEQ ID NO's: 642-726;
      [1415] h) amino acid sequences that have at least 80% amino acid identity with at least one of the amino acid sequences of SEQ ID NO's: 642-726;
      [1416] i) amino acid sequences that have 3, 2, or 1 amino acid difference with at least one of the amino acid sequences of SEQ ID NO's: 642-726.
         Such an amino acid sequence is preferably directed against IL-6R and/or an amino acid sequence that can specifically bind to IL-6R. Also, such an amino acid sequence is preferably an amino acid sequence according to any of the 133-161.
[1417] 163. An amino acid sequence that essentially consists of 4 framework regions (FR1 to FR4, respectively) and 3 complementarity determining regions (CDR1 to CDR3, respectively), in which:
   [1418] CDR1 is chosen from the group consisting of:
      [1419] a) the amino acid sequences of SEQ ID NO's: 302-386;
      [1420] b) amino acid sequences that have at least 80% amino acid identity with at least one of the amino acid sequences of SEQ ID NO's: 302-386;
      [1421] c) amino acid sequences that have 3, 2, or 1 amino acid difference with at least one of the amino acid sequences of SEQ ID NO's: 302-386;
   [1422] and
   [1423] CDR2 is chosen from the group consisting of:
      [1424] d) the amino acid sequences of SEQ ID NO's: 472-556;
      [1425] e) amino acid sequences that have at least 80% amino acid identity with at least one of the amino acid sequences of SEQ ID NO's: 472-556;
      [1426] f) amino acid sequences that have 3, 2, or 1 amino acid difference with at least one of the amino acid sequences of SEQ ID NO's: 472-556;
   [1427] and
   [1428] CDR3 is chosen from the group consisting of:
      [1429] g) the amino acid sequences of SEQ ID NO's: 642-726;
      [1430] h) amino acid sequences that have at least 80% amino acid identity with at least one of the amino acid sequences of SEQ ID NO's: 642-726;
      [1431] i) amino acid sequences that have 3, 2, or 1 amino acid difference with at least one of the amino acid sequences of SEQ ID NO's: 642-726.
         Such an amino acid sequence is preferably directed against IL-6R and/or an amino acid sequence that can specifically bind to IL-6R. Also, such an amino acid sequence is preferably an amino acid sequence according to any of the aspects 133-161.
[1432] 164. An amino acid sequence according to any of aspects 162 to 163, in which the CDR sequences of said amino acid sequence have at least 70% amino acid identity, preferably at least 80% amino acid identity, more preferably at least 90% amino acid identity, such as 95% amino acid identity or more or even essentially 100% amino acid identity with the CDR sequences of at least one of the amino acid sequences of SEQ ID NO's: 132-216.
   [1433] Such an amino acid sequence is preferably directed against IL-6R and/or an amino acid sequence that can specifically bind to IL-6R. Also, such an amino acid sequence is preferably an amino acid sequence according to any of the aspects 133 to 161.
[1434] 165. An amino acid sequence according to any of aspects 162 to 164 that is directed against IL-6R and that cross-blocks the binding of at least one of the amino acid sequences according to any of aspects the amino acid sequences of SEQ ID NO's: 132-216.
[1435] 166. An amino acid sequence according to any of aspects 162 to 165 that is directed against IL-6R and that is cross-blocked from binding to IL-6R by at least one of the amino acid sequences of SEQ ID NO's: 132-216.
[1436] 167. Amino acid sequence according to any of aspects 165 or 166 wherein the ability of said amino acid sequence to cross-block or to be cross-blocked is detected in a Biacore assay.
[1437] 168. Amino acid sequence according to any of aspects 165 or 166 wherein the ability of said amino acid sequence to cross-block or to be cross-blocked is detected in an ELISA assay.
[1438] 169. An amino acid sequence according to any of aspects 162 168, that is in essentially isolated form.
[1439] 170. An amino acid sequence according to any of aspects 162 to 169, for administration to a subject, wherein said an amino acid sequence does not naturally occur in said subject.
[1440] 171. An amino acid sequence according to any of aspects 162 to 170, that can specifically bind to IL-6R with a dissociation constant (K_{D}) of 10⁻⁵ to 10⁻¹² moles/litre or less, and preferably 10⁻⁷ to 10⁻¹² moles/litre or less and more preferably 10⁻⁸ to 10⁻¹² moles/litre.
[1441] 172. An amino acid sequence according to any of aspects 162 to 171, that can specifically bind to IL-6R with a rate of association (kₒₙ-rate) of between 10² M⁻¹s⁻¹ to about 10⁷ M⁻¹s⁻¹, preferably between 10³ M⁻¹s⁻¹ and 10⁷ M⁻¹s⁻¹, more preferably between 10⁴ M⁻¹s⁻¹ and 10⁷ M⁻¹s⁻¹, such as between 10⁵ M⁻¹s⁻¹ and 10⁷ M⁻¹s⁻¹.
[1442] 173. An amino acid sequence according to any of aspects 1621 to 172, that can specifically bind to IL-6R with a rate of dissociation (k_{off} rate) between 1 s⁻¹ and 10⁻⁶ s¹ preferably between 10⁻² and 10⁻⁶ s⁻¹, more preferably between 10⁻³ s⁻¹ and 10⁻⁶ s⁻¹, such as between 10⁻⁴ s⁻¹ and 10⁻⁶ s⁻¹.
[1443] 174. An amino acid sequence according to any of aspects 162 to 173, that can specifically bind to IL-6R with an affinity less than 500 nM, preferably less than 200 nM, more preferably less than 10 nM, such as less than 500 μM.
[1444] 175. An amino acid sequence according to any of aspects 162 to 174, that is a naturally occurring amino acid sequence (from any suitable species) or a synthetic or semi-synthetic amino acid sequence.
[1445] 176. An amino acid sequence according to any of aspects 162 to 175, that comprises an immunoglobulin fold or that under suitable conditions is capable of forming an immunoglobulin fold.
[1446] 177. An amino acid sequence according to any of aspects 162 to 176, that is an immunoglobulin sequence.
[1447] 178. An amino acid sequence according to any of aspects 162 to 177, that is a naturally occurring immunoglobulin sequence (from any suitable species) or a synthetic or semi-synthetic immunoglobulin sequence.
[1448] 179. An amino acid sequence according to any of aspects 162 to 178, that is a humanized immunoglobulin sequence, a camelized immunoglobulin sequence or an immunoglobulin sequence that has been obtained by techniques such as affinity maturation.
[1449] 180. An amino acid sequence according to any of aspects 162 to 179, that essentially consists of a light chain variable domain sequence (e.g. a V_{L}-sequence); or of a heavy chain variable domain sequence (e.g. a Vₕ-sequence).
[1450] 181. An amino acid sequence according to any of aspects 162 to 180, that essentially consists of a heavy chain variable domain sequence that is derived from a conventional four-chain antibody or that essentially consist of a heavy chain variable domain sequence that is derived from heavy chain antibody.
[1451] 182. An amino acid sequence according to any of aspects 162 to 181, that essentially consists of a domain antibody (or an amino acid sequence that is suitable for use as a domain antibody), of a single domain antibody (or an amino acid sequence that is suitable for use as a single domain antibody), of a “dAb” (or an amino acid sequence that is suitable for use as a dAb) or of a Nanobody (including but not limited to a V_{HH} sequence).
[1452] 183. An amino acid sequence according to any of aspects 162 to 182, that essentially consists of a Nanobody.
[1453] 184. An amino acid sequence according to any of aspects 162 to 183, that essentially consists of a Nanobody that
   [1454] i) has at least 80% amino acid identity with at least one of the amino acid sequences of SEQ ID NO's: 1 to 22, in which for the purposes of determining the degree of amino acid identity, the amino acid residues that form the CDR sequences are disregarded; and in which:
   [1455] ii) preferably one or more of the amino acid residues at positions 11, 37, 44, 45, 47, 83, 84, 103, 104 and 108 according to the Kabat numbering are chosen from the Hallmark residues mentioned in Table B-2.
[1456] 185. An amino acid sequence according to any of aspects 162 to 184, that essentially consists of a Nanobody that
   [1457] i) has at least 80% amino acid identity with at least one of the amino acid sequences of SEQ ID NO's: 132-216, in which for the purposes of determining the degree of amino acid identity, the amino acid residues that form the CDR sequences are disregarded; and in which:
   [1458] ii) preferably one or more of the amino acid residues at positions 11, 37, 44, 45, 47, 83, 84, 103, 104 and 108 according to the Kabat numbering are chosen from the Hallmark residues mentioned in Table B-2.
[1459] 186. An amino acid sequence according to any of aspects 162 to 185, that essentially consists of a humanized Nanobody.
[1460] 187. Nanobody in which:
   [1461] CDR1 is chosen from the group consisting of:
      [1462] a) the amino acid sequences of SEQ ID NO's: 302-386;
      [1463] b) amino acid sequences that have at least 80% amino acid identity with at least one of the amino acid sequences of SEQ ID NO's: 302-386;
      [1464] c) amino acid sequences that have 3, 2, or 1 amino acid difference with at least one of the amino acid sequences of SEQ ID NO's: 302-386;
   [1465] and/or
   [1466] CDR2 is chosen from the group consisting of:
      [1467] d) the amino acid sequences of SEQ ID NO's: 472-556;
      [1468] e) amino acid sequences that have at least 80% amino acid identity with at least one of the amino acid sequences of SEQ ID NO's: 472-556;
      [1469] f) amino acid sequences that have 3, 2, or 1 amino acid difference with at least one of the amino acid sequences of SEQ ID NO's: 472-556;
   [1470] and/or
   [1471] CDR3 is chosen from the group consisting of:
      [1472] g) the amino acid sequences of SEQ ID NO's: 642-726;
      [1473] h) amino acid sequences that have at least 80% amino acid identity with at least one of the amino acid sequences of SEQ ID ND's: 642-726;
      [1474] i) amino acid sequences that have 3, 2, or 1 amino acid difference with at least one of the amino acid sequences of SEQ ID NO's: 642-726.
[1475] 188. Nanobody according to aspect 187, in which:
   [1476] CDR1 is chosen from the group consisting of:
      [1477] a) the amino acid sequences of SEQ ID NO's: 302-386;
      [1478] b) amino acid sequences that have at least 80% amino acid identity with at least one of the amino acid sequences of SEQ ID NO's: 302-386;
      [1479] c) amino acid sequences that have 3, 2, or 1 amino acid difference with at least one of the amino acid sequences of SEQ ID NO's: 302-386;
   [1480] and
   [1481] CDR2 is chosen from the group consisting of:
      [1482] d) the amino acid sequences of SEQ ID NO's: 472-556;
      [1483] e) amino acid sequences that have at least 80% amino acid identity with at least one of the amino acid sequences of SEQ ID NO's: 472-556;
      [1484] f) amino acid sequences that have 3, 2, or 1 amino acid difference with at least one of the amino acid sequences of SEQ ID NO's: 472-556;
   [1485] and
   [1486] CDR3 is chosen from the group consisting of:
      [1487] g) the amino acid sequences of SEQ ID NO's: 642-726;
      [1488] h) amino acid sequences that have at least 80% amino acid identity with at least one of the amino acid sequences of SEQ ID NO's: 642-726;
      [1489] i) amino acid sequences that have 3, 2, or 1 amino acid difference with at least one of the amino acid sequences of SEQ ID NO's: 642-726.
[1490] 189. Nanobody according to any of aspects 187 or 188, in which the CDR sequences have at least 70% amino acid identity, preferably at least 80% amino acid identity, more preferably at least 90% amino acid identity, such as 95% amino acid identity or more or even essentially 100% amino acid identity with the CDR sequences of at least one of the amino acid sequences of SEQ ID NO's: 132-216.
[1491] 190. Nanobody according to any of aspects 187 to 189, which is a partially humanized Nanobody.
[1492] 191. Nanobody according to any of aspects 187 to 190, which is a fully humanized Nanobody.
[1493] 192. Nanobody according to any of aspects 187 to 191, that is chosen from the group consisting of SEQ ID NO's: 132-216 or from the group consisting of from amino add sequences that have more than 80%, preferably more than 90%, more preferably more than 95%, such as 99% or more sequence identity (as defined herein) with at least one of the amino acid sequences of SEQ ID NO's: 132-216.
[1494] 193. Nanobody according to any of aspects 187 to 192, that is chosen from the group consisting of SEQ ID NO's: 132-216.
[1495] 194. Nanobody directed against IL-6R that cross-blocks the binding of at least one of the amino acid sequences of SEQ ID NO's: 132-216 to IL-6R.
[1496] 195. Nanobody directed against IL-6R that is cross-blocked from binding to IL-6R by at least one of the amino acid sequences of SEQ ID NO's: 132-216.
[1497] 196. Nanobody according to any of aspects 194 or 195 wherein the ability of said Nanobody to cross-block or to be cross-blocked is detected in a Biacore assay.
[1498] 197. Nanobody according to any of aspects 194 to 195 wherein the ability of said Nanobody to cross-block or to be cross-blocked is detected in an ELISA assay.
[1499] 198. Polypeptide that comprises or essentially consists of one or more amino acid sequences according to any of aspects 133 to 186 and/or one or more Nanobodies according to any of aspects 187 to 197, and optionally further comprises one or more peptidic linkers.
[1500] 199. Polypeptide according to aspect 198, in which said one or more binding units are immunoglobulin sequences.
[1501] 200. Polypeptide according to any of aspects 198 or 199, in which said one or more other groups, residues, moieties or binding units are chosen from the group consisting of domain antibodies, amino acid sequences that are suitable for use as a domain antibody, single domain antibodies, amino acid sequences that are suitable for use as a single domain antibody, “dAb”'s, amino acid sequences that are suitable for use as a dAb, or Nanobodies.
[1502] 201. Polypeptide according to any of aspects 198 to 200, in which said one or more amino acid sequences of the invention are immunoglobulin sequences.
[1503] 202. Polypeptide according to any of aspects 198 to 201, in which said one or more amino acid sequences of the invention are chosen from the group consisting of domain antibodies, amino acid sequences that are suitable for use as a domain antibody, single domain antibodies, amino acid sequences that are suitable for use as a single domain antibody, “dAb”'s, amino acid sequences that are suitable for use as a dAb, or Nanobodies.
[1504] 203. Polypeptide according to any of aspects 198 to 202, that comprises or essentially consists of one or more Nanobodies according to any of aspects 187 to 197 and in which said one or more other binding units are Nanobodies.
[1505] 204. Polypeptide according to any of aspects 198 to 203, which is a multivalent construct.
[1506] 205. Polypeptide according to any of aspects 198 to 204, which is a multiparatopic construct.
[1507] 206. Polypeptide according to any of aspects 198 to 205, which is a multispecific construct.
[1508] 207. Polypeptide according to any of aspects 198 to 206, which has an increased half-life, compared to the corresponding amino acid sequence according to any of aspects 133 to 186 per se or Nanobody according to any of aspects 187 to 197 per se, respectively.
[1509] 208. Polypeptide according to aspect 207, in which said one or more other binding units provide the polypeptide with increased half-life, compared to the corresponding amino acid sequence according to any of aspects 133 to 186 per se or Nanobody according to any of aspects 187 to 197 per se, respectively.
[1510] 209. Polypeptide according to aspect 207 or 208, in which said one or more other binding units that provide the polypeptide with increased half-life is chosen from the group consisting of serum proteins or fragments thereof, binding units that can bind to serum proteins, an Fc portion, and small proteins or peptides that can bind to serum proteins.
[1511] 210. Polypeptide according to any of aspects 207 to 209, in which said one or more other binding units that provide the polypeptide with increased half-life is chosen from the group consisting of human serum albumin or fragments thereof.
[1512] 211. Polypeptide according to any of aspect 207 to 210, in which said one or more other binding units that provides the polypeptide with increased half-life are chosen from the group consisting of binding units that can bind to serum albumin (such as human serum albumin) or a serum immunoglobulin (such as IgG).
[1513] 212. Polypeptide according to any of aspects 207 to 211, in which said one or more other binding units that provides the polypeptide with increased half-life are chosen from the group consisting of domain antibodies, amino acid sequences that are suitable for use as a domain antibody, single domain antibodies, amino acid sequences that are suitable for use as a single domain antibody, “dAb”'s, amino acid sequences that are suitable for use as a dAb, or Nanobodies that can bind to serum albumin (such as human serum albumin) or a serum immunoglobulin (such as IgG),
[1514] 213. Polypeptide according to aspect 207 to 212, in which said one or more other binding units that provides the polypeptide with increased half-life is a Nanobody that can bind to serum albumin (such as human serum albumin) or a serum immunoglobulin (such as IgG).
[1515] 214. Polypeptide according to any of aspects 207 to 213, that has a serum half-life that is at least 1.5 times, preferably at least 2 times, such as at least 5 times, for example at least 10 times or more than 20 times, greater than the half-life of the corresponding amino acid sequence according to any of aspects 133 to 186 per se or Nanobody according to any of aspects 187 to 197 per se, respectively.
[1516] 215. Polypeptide according to any of aspects 207 to 214, that has a serum half-life that is increased with more than 1 hours, preferably more than 2 hours, more preferably more than 6 hours, such as more than 12 hours, or even more than 24, 48 or 72 hours, compared to the corresponding amino acid sequence according to any of aspects 133 to 186 per se or Nanobody according to any of aspects 187 to 197 per se, respectively.
[1517] 216. Polypeptide according to any of aspects 198 to 215, that has a serum half-life in human of at least about 12 hours, preferably at least 24 hours, more preferably at least 48 hours, even more preferably at least 72 hours or more; for example, of at least 5 days (such as about 5 to 10 days), preferably at least 9 days (such as about 9 to 14 days), more preferably at least about 10 days (such as about 10 to 15 days), or at least about 11 days (such as about 11 to 16 days), more preferably at least about 12 days (such as about 12 to 18 days or more), or more than 14 days (such as about 14 to 19 days).
[1518] 217. Compound or construct, that comprises or essentially consists of one or more polypeptides according to any of aspects 1 to 132, amino acid sequences according to any of aspects 133 to 186 and/or one or more Nanobodies according to any of aspects 187 to 197, and optionally further comprises one or more other groups, residues, moieties or binding units, optionally linked via one or more linkers.
[1519] 218. Compound or construct according to aspect 217, in which said one or more other groups, residues, moieties or binding units are amino acid sequences.
[1520] 219. Compound or construct according to aspect 217 or 218, in which said one or more linkers, if present, are one or more amino acid sequences.
[1521] 220. Compound or construct according to any of aspects 217 to 219, in which said one or more other groups, residues, moieties or binding units are immunoglobulin sequences.
[1522] 221. Compound or construct according to any of aspects 217 to 220, in which said one or more other groups, residues, moieties or binding units are chosen from the group consisting of domain antibodies, amino acid sequences that are suitable for use as a domain antibody, single domain antibodies, amino acid sequences that are suitable for use as a single domain antibody, “dAb”'s, amino acid sequences that are suitable for use as a dAb, or Nanobodies.
[1523] 222. Compound or construct according to any of aspects 217 to 221, in which said one or more amino acid sequences are immunoglobulin sequences.
[1524] 223. Compound or construct according to any of aspects 217 to 222, in which said one or more amino acid sequences are chosen from the group consisting of domain antibodies, amino acid sequences that are suitable for use as a domain antibody, single domain antibodies, amino acid sequences that are suitable for use as a single domain antibody, “dAb”'s, amino acid sequences that are suitable for use as a dAb, or Nanobodies.
[1525] 224. Compound or construct, that comprises or essentially consists of one or more Nanobodies according to any of aspects 187 to 197 and in which said one or more other groups, residues, moieties or binding units are Nanobodies.
[1526] 225. Compound or construct according to any of aspects 217 to 224, which is a multivalent construct.
[1527] 226. Compound or construct according to any of aspects 217 to 225, which is a multispecific construct.
[1528] 227. Compound or construct according to any of aspects 217 to 226, which is a mutliparatopic construct.
[1529] 228. Compound or construct according to any of aspects 217 to 227, which has an increased half-life, compared to the corresponding polypeptide according to any of aspects 1 to 132 per se, amino acid sequence according to any of aspects 133 to 186 per se or Nanobody according to any of aspects 187 to 197 per se, respectively.
[1530] 229. Compound or construct according to aspect 217 to 228, in which said one or more other groups, residues, moieties or binding units provide the compound or construct with increased half-life, compared to the corresponding polypeptide according to any of aspects 1 to 132 per se, amino acid sequence according to any of aspects 133 to 186 per se or Nanobody according to any of aspects 187 to 197 per se, respectively.
[1531] 230. Compound or construct according to aspect 229, in which said one or more other groups, residues, moieties or binding units that provide the compound or construct with increased half-life is chosen from the group consisting of serum proteins or fragments thereof, binding units that can bind to serum proteins, an Fc portion, and small proteins or peptides that can bind to serum proteins.
[1532] 231. Compound or construct according to aspect 229 or 230, in which said one or more other groups, residues, moieties or binding units that provide the compound or construct with increased half-life is chosen from the group consisting of human serum albumin or fragments thereof.
[1533] 232. Compound or construct according to any of aspects 229 to 231, in which said one or more other groups, residues, moieties or binding units that provides the compound or construct with increased half-life are chosen from the group consisting of binding units that can bind to serum albumin (such as human serum albumin) or a serum immunoglobulin (such as IgG).
[1534] 233. Compound or construct according to any of aspects 229 to 232, in which said one or more other groups, residues, moieties or binding units that provides the compound or construct with increased half-life are chosen from the group consisting of domain antibodies, amino acid sequences that are suitable for use as a domain antibody, single domain antibodies, amino acid sequences that are suitable for use as a single domain antibody, “dAb”'s, amino acid sequences that are suitable for use as a dAb, or Nanobodies that can bind to serum albumin (such as human serum albumin) or a serum immunoglobulin (such as IgG).
[1535] 234. Compound or construct according to any of aspects 229 to 233, in which said one or more other groups, residues, moieties or binding units that provides the compound or construct with increased half-life is a Nanobody that can bind to serum albumin (such as human serum albumin) or a serum immunoglobulin (such as IgG).
[1536] 235. Compound or construct according to any of aspects 229 to 234, that has a serum half-life that is at least 1.5 times, preferably at least 2 times, such as at least 5 times, for example at least 10 times or more than 20 times, greater than the half-life of the corresponding polypeptide according to any of aspects 1 to 132 per se, amino acid sequence according to any of aspects 133 to 186 per se or Nanobody according to any of aspects 187 to 197 per se, respectively.
[1537] 236. Compound or construct according to any of aspects 229 to 235, that has a serum half-life that is increased with more than 1 hours, preferably more than 2 hours, more preferably more than 6 hours, such as more than 12 hours, or even more than 24, 48 or 72 hours, compared to the corresponding polypeptide according to any of aspect 1 to 132 per se, amino acid sequence according to any of aspects 133 to 186 per se or Nanobody according to any of aspects 187 to 197 per se, respectively.
[1538] 237. Compound or construct according to any of aspects 229 to 236, that has a serum half-life in human of at least about 12 hours, preferably at least 24 hours, more preferably at least 48 hours, even more preferably at least 72 hours or more; for example, of at least 5 days (such as about 5 to 10 days), preferably at least 9 days (such as about 9 to 14 days), more preferably at least about 10 days (such as about 10 to 15 days), or at least about 11 days (such as about 11 to 16 days), more preferably at least about 12 days (such as about 12 to 18 days or more), or more than 14 days (such as about 14 to 19 days).
[1539] 238. Monovalent construct, comprising or essentially consisting of one amino acid sequence according to any of 133 to 186 and/or one Nanobody according to any of aspects 187 to 197.
[1540] 239. Monovalent construct according to aspect 238, in which said amino acid sequence is chosen from the group consisting of domain antibodies, amino acid sequences that are suitable for use as a domain antibody, single domain antibodies, amino acid sequences that are suitable for use as a single domain antibody, “dAb”'s, amino acid sequences that are suitable for use as a dAb, or Nanobodies.
[1541] 240. Monovalent construct, comprising or essentially consisting of one Nanobody according to any of aspects 187 to 197.
[1542] 241. Monovalent construct, that is chosen from the group consisting of SEQ ID NO's: 132-216 or from the group consisting of amino acid sequences that have more than 80%, preferably more than 90%, more preferably more than 95%, such as 99% or more sequence identity (as defined herein) with at least one of the amino acid sequences of SEQ ID NO's: 132-216.
[1543] 242. Use of a monovalent construct according to any of aspects 238 to 241, in preparing a multivalent polypeptide according to any of aspects 1 to 132 or 198 to 216 and/or a multivalent compound or construct according to any of aspects 217 to 237.
[1544] 243. Use of a monovalent construct according to aspect 242, in preparing a multiparatopic polypeptide such as a biparatopic polypeptide or a multiparatopic construct such as a biparatopic construct.
[1545] 244. Use of a monovalent construct according to any of aspects 242 or 243, wherein the monovalent construct is used as a binding domain or binding unit in preparing a multivalent construct comprising two or more binding units.
[1546] 245. Use of a monovalent construct according to any of aspects 242 to 244, in preparing a multivalent construct that exhibits intramolecular binding compared to intermolecular binding.
[1547] 246. Use of a monovalent construct according to any of aspects 242 to 245, as a binding domain or binding unit in preparing a multivalent construct, wherein the binding domains or binding units are linked via a linker such that the multivalent construct preferably exhibits intramolecular binding compared to intermolecular binding.
[1548] 247. Use of a monovalent construct according to any of aspects 242 to 246, wherein the monovalent construct is directed against the IL-6 binding site on IL-6R and/or is capable of competing with IL-6 for binding to IL-6R.
[1549] 248. Use of a monovalent construct according to any of aspects 242 to 246, wherein the monovalent construct is directed against one or more of the 18 contact residues as described in Boulanger et al. 2003 (Science 300, 2101-2104) present in the extracellular D3 domain of the IL-6R.
[1550] 249. Use of a monovalent construct according to any of aspects 242 to 246, wherein the monovalent construct is directed against amino acid residues Phe229 and Phe279 present in the extracellular D3 domain of the IL-6R.
[1551] 250. Use of a monovalent construct according to any of aspects 242 to 246, wherein the monovalent construct is directed against the gp130 binding site on IL-6R and/or the IL-6/IL-6R complex.
[1552] 251. Use of a monovalent construct according to any of aspects 242 to 246, wherein the monovalent construct is directed against the Tocilizumab (MRA) binding site on IL-6R and/or is capable of competing with Tocilizumab (MRA) for binding to IL-6R.
[1553] 252. Use of a monovalent construct according to any of aspects 242 to 246, wherein the monovalent construct is directed against the binding site for the reference IgG and the reference Fab on IL-6R and/or is capable of competing with the reference IgG and the reference Fab for binding to 1 L-6R.
[1554] 253. Use of a monovalent construct according to any of aspects 242 to 246, wherein the monovalent construct is directed against the M182 binding site on IL-6R and/or is capable of competing with M182 for binding to IL-6R.
[1555] 254. Use of a monovalent construct according to any of aspects 242 to 246, wherein the monovalent construct is directed against the BN-12 binding site on IL-6R and/or is capable of competing with BN-12 for binding to IL-6R.
[1556] 255. Use of two monovalent constructs according to any of aspects 242 to 246, wherein a first monovalent construct is directed against the IL-6 binding site on IL-6R (and in particular against one or more of the 18 contact residues as described in Boulanger et al. 2003 (Science 300, 2101-2104) present in the extracellular D3 domain of the IL-6R, more particularly against amino acid residues Phe229 and Phe279 present in the extracellular D3 domain of the IL-6R) and/or is capable of competing with IL-6 for binding to IL-6R and wherein the second monovalent construct is directed against the gp130 binding site on IL-6R and/or the IL-6/IL-6R complex and/or is capable of competing with gn130 for binding to the IL-6/IL-6R complex.
[1557] 256. Use of two monovalent constructs according to any of aspects 242 to 246, wherein a first monovalent construct is directed against the IL-6 binding site on IL-6R (and in particular against one or more of the 18 contact residues as described in Boulanger et al. 2003 (Science 300, 2101-2104) present in the extracellular D3 domain of the IL-6R, more particularly against amino acid residues Phe229 and Phe279 present in the extracellular D3 domain of the IL-6R) and/or is capable of competing with IL-6 for binding to IL-6R and wherein the second monovalent construct is directed against the M182 binding site on IL-6R and/or is capable of competing with M182 for binding to IL-6R.
[1558] 257. Use of two monovalent constructs according to any of aspects 242 to 246, wherein a first monovalent construct is directed against the IL-6 binding site on IL-6R (and in particular against one or more of the 18 contact residues as described in Boulanger et al. 2003 (Science 300, 2101-2104) present in the extracellular D3 domain of the IL-6R, more particularly against amino acid residues Phe229 and Phe279 present in the extracellular D3 domain of the IL-6R) and/or is capable of competing with IL-6 for binding to IL-6R and wherein the second monovalent construct is directed against the BN-12 binding site on IL-6R and/or is capable of competing with BN-12 for binding to IL-6R.
[1559] 258. Use of two monovalent constructs according to any of aspects 242 to 246, wherein a first monovalent construct is directed against the Tocilizumab (MRA) binding site on IL-6R and/or is capable of competing with Tocilizumab (MRA) for binding to IL-6R and wherein the second monovalent construct is directed against the gp130 binding site on IL-6R and/or the IL-6/IL-6R complex and/or is capable of competing with gp130 for binding to the IL-6/IL-6R complex.
[1560] 259. Use of two monovalent constructs according to any of aspects 242 to 246, wherein a first monovalent construct is directed against the Tocilizumab (MRA) binding site on IL-6R and/or is capable of competing with Tocilizumab (MRA) for binding to IL-6R and wherein the second monovalent construct is directed against the M182 binding site on IL-6R and/or is capable of competing with M182 for binding to IL-6R.
[1561] 260. Use of two monovalent constructs according to any of aspects 242 to 246, wherein a first monovalent construct is directed against the Tocilizumab (MRA) binding site on IL-6R and/or is capable of competing with Tocilizumab (MRA) for binding to IL-6R and wherein the second monovalent construct is directed against the BN-12 binding site on IL-6R and/or is capable of competing with BN-12 for binding to IL-6R.
[1562] 261. Use of two monovalent constructs according to any of aspects 242 to 246, wherein a first monovalent construct is directed against the binding site for the reference IgG and the reference Fab on IL-6R and/or is capable of competing with the reference IgG and the reference Fab for binding to IL-6R and wherein the second monovalent construct is directed against the gp130 binding site on IL-6R and/or the IL-6/IL-6R complex and/or is capable of competing with gp130 for binding to the IL-6/IL-6R complex.
[1563] 262. Use of two monovalent constructs according to any of aspects 242 to 246, wherein a first monovalent construct is directed against the binding site for the reference IgG and the reference Fab on IL-6R and/or is capable of competing with the reference IgG and the reference Fab for binding to IL-6R and wherein the second monovalent construct is directed against the M182 binding site on IL-6R and/or is capable of competing with M182 for binding to IL-6R.
[1564] 263. Use of two monovalent constructs according to any of aspects 242 to 246, wherein a first monovalent construct is directed against the binding site for the reference IgG and the reference Fab on IL-6R and/or is capable of competing with the reference IgG and the reference Fab for binding to IL-6R and wherein the second monovalent construct is directed against the BN-12 binding site on IL-6R and/or is capable of competing with BN-12 for binding to IL-6R.
[1565] 264. Use of two monovalent constructs according to any of aspects 242 to 246, wherein a first monovalent construct is directed against BN-12 binding site on IL-6R and/or is capable of competing with BN-12 for binding to IL-6R and wherein the second monovalent construct is directed against the gp130 binding site on IL-6R and/or the IL-6/IL-6R complex and/or is capable of competing with gp130 for binding to the IL-6/IL-6R complex.
[1566] 265. Use of two monovalent constructs according to any of aspects 242 to 246, wherein a first monovalent construct is directed against the BN-12 binding site on IL-6R and/or is capable of competing with BN-12 for binding to IL-6R and wherein the second monovalent construct is directed against the M182 binding site on IL-6R and/or is capable of competing with M182 for binding to IL-6R.
[1567] 266. Nucleic acid or nucleotide sequence, that encodes an amino acid sequence according to any of aspects 133 to 186, a Nanobody according to any of aspects 187 to 197, a polypeptide according to any of aspects 1 to 132 and 198 to 216, a compound or construct according to any of aspects 217 to 237 that is such that it can be obtained by expression of a nucleic acid or nucleotide sequence encoding the same, or a monovalent construct according to any of aspects 238 to 241.
[1568] 267. Nucleic acid or nucleotide sequence according to aspect 266, that is in the form of a genetic construct.
[1569] 268. Use of a nucleic acid or nucleotide sequence according to aspect 266, that encodes a monovalent construct according to any of aspects 238 to 241, for the preparation of a genetic construct that encodes a multivalent polypeptide according to any of aspects 1 to 132 and 198 to 216 or a multivalent construct according to any of aspects 217 to 237.
[1570] 269. Use of a nucleic acid or nucleotide sequence according to aspect 268, wherein the genetic construct encodes a multiparatopic (such as a biparatopic) construct.
[1571] 270. Method for preparing and/or generating a multiparatopic (such as e.g. biparatopic, triparatopic, etc.) polypeptide or construct according to any of aspects 1 to 132, said method comprising at least the steps of:
   [1572] a) providing a nucleic acid sequence according to aspect 266, encoding a first IL-6R binding amino acid sequence, fused to a set, collection or library of nucleic acid sequences encoding amino acid sequences;
   [1573] b) screening said set, collection or library of nucleic acid sequences for nucleic acid sequences that encode a second amino acid sequence that can bind to and/or has affinity for an antigenic determinant on IL-6R different from the antigenic determinant recognized by the first IL-6R binding amino acid sequence;
   [1574] and
   [1575] c) isolating the nucleic acid sequence encoding an IL-6R binding amino acid sequence fused to the nucleic acid sequence obtained in b), followed by expressing the encoded construct.
[1576] 271. Method for preparing and/or generating a multiparatopic (such as e.g. biparatopic, triparatopic, etc.) polypeptide or construct according to any of aspects 1 to 132, said method comprising at least the steps of:
   [1577] a) providing a set, collection or library of nucleic acid sequences, in which each nucleic acid sequence in said set, collection or library encodes a fusion protein that comprises a first amino acid sequence that can bind to and/or has affinity for a first antigenic determinant, part, domain or epitope on IL-6R that is fused (optionally via a linker sequence) to a second amino acid sequence, in which essentially each second amino acid sequence (or most of these) is a different member of a set, collection or library of different amino acid sequences;
   [1578] b) screening said set, collection or library of nucleic acid sequences for nucleic acid sequences that encode an amino acid sequence that can bind to and/or has affinity for a second antigenic determinant, part, domain or epitope on IL-6R different from the first antigenic determinant, part, domain or epitope on IL-6R;
   [1579] and
   [1580] c) isolating the nucleic acid sequences that encode an amino acid sequence that can bind to and/or has affinity for a second antigenic determinant, part, domain or epitope on IL-6R different from the first antigenic determinant, part, domain or epitope on IL-6R, obtained in b), optionally followed by expressing the encoded amino acid sequence.
[1581] 272. Method according to aspect 271, wherein the first amino acid is also encoded by a set, collection or library of nucleic acid sequences and wherein, in step b), said set, collection or library of nucleic acid sequences is screened for nucleic acid sequences that encode an amino acid sequence that can bind to and/or has affinity for the first antigenic determinant, part, domain or epitope on IL-6R.
[1582] 273. Method according to aspect 272, wherein the screening in step b) is performed in a single step.
[1583] 274. Method according to aspect 272, wherein the screening in step b) is performed in subsequent steps.
[1584] 275. Method according to any of aspects 270 to 274, wherein the first amino acid sequence used in step a) is preferably such that (i) it can bind to and/or has affinity for the IL-6 binding site on IL-6R (and in particular against one or more of the 18 contact residues as described in Boulanger et al. 2003 (Science 300, 2101-2104) present in the extracellular D3 domain of the IL-6R, more particularly against amino acid residues Phe229 and Phe279 present in the extracellular 03 domain of the IL-6R) and/or (ii) competes with IL-6 for binding to IL-6R.
[1585] 276. Method according to any of aspects 270 to 274, wherein the first amino acid sequence used in step a) is preferably such that (i) it can bind to and/or has affinity for the Tocilizumab (MRA) binding site on IL-6R and/or (ii) competes with Tocilizumab (MRA) for binding to IL-6R.
[1586] 277. Method according to any of aspects 270 to 274, wherein the first amino acid sequence used in step a) is preferably such that (i) it can bind to and/or has affinity for the binding site for the reference IgG and the reference Fab on IL-6R and/or (ii) competes with the reference IgG and the reference Fab for binding to IL-6R.
[1587] 278. Method according to any of aspects 270 to 277, wherein in step b), the set, collection or library of nucleic acid sequences is screened for nucleic acid sequences that encode (i) an amino acid sequence that can bind to and/or has affinity for the gp130 binding site on IL-6R and/or the IL-6/IL-6R complex and/or (ii) an amino acid sequence that can compete with gp130 for binding to the IL-6/IL-6R complex.
[1588] 279. Method according to any of aspects 270 to 277, wherein in step b), the set, collection or library of nucleic acid sequences is screened for nucleic acid sequences that encode (i) an amino acid sequence that can bind to and/or has affinity for the M182 binding site on IL-6R and/or (ii) an amino acid sequence that can compete with M182 for binding to IL-6R.
[1589] 280. Method according to any of aspects 270 to 277, wherein in step b), the set, collection or library of nucleic acid sequences is screened for nucleic acid sequences that encode (i) an amino acid sequence that can bind to and/or has affinity for the BN-12 binding site on IL-6R and/or (ii) an amino acid sequence that can compete with BN-12 for binding to IL-6R.
[1590] 281. Method according to any of aspects 270 to 274, wherein the first amino acid sequence used in step a) is preferably such that (i) it can bind to and/or has affinity for the gp130 binding site on IL-6R and/or the IL-6/IL-6R complex and/or (ii) an amino acid sequence that can compete with gp130 for binding to the IL-6/IL-6R complex.
[1591] 282. Method according to any of aspects 270 to 274, wherein the first amino acid sequence used in step a) is preferably such that (1) it can bind to and/or has affinity for the M182 binding site on IL-6R and/or (ii) an amino acid sequence that can compete with M182 for binding to IL-6R.
[1592] 283. Method according to any of aspects 270 to 274 or 281 to 282, wherein in step b), the set, collection or library of nucleic acid sequences is screened for nucleic acid sequences that encode (i) an amino acid sequence that can bind to and/or has affinity for the IL-6 binding site on IL-6R (and in particular against one or more of the 18 contact residues as described in Boulanger et al. 2003 (Science 300, 2101-2104) present in the extracellular D3 domain of the IL-6R, more particularly against amino acid residues Phe229 and Phe279 present in the extracellular D3 domain of the IL-6R) and/or (ii) competes with IL-6 for binding to IL-6R.
[1593] 284. Method according to any of aspects 270 to 274 or 281 to 282, wherein in step b), the set, collection or library of nucleic acid sequences is screened for nucleic acid sequences that encode (i) an amino acid sequence that can bind to and/or has affinity for the Tocilizumab (MRA) binding site on IL-6R and/or (ii) competes with Tocilizumab (MRA) for binding to IL-6R.
[1594] 285. Method according to any of aspects 270 to 274 or 281 to 282, wherein in step b), the set, collection or library of nucleic acid sequences is screened for nucleic acid sequences that encode (i) an amino acid sequence that can bind to and/or has affinity for the binding site for the reference IgG and the reference Fab on IL-6R and/or (ii) competes with the reference IgG and the reference Fab for binding to IL-6R.
[1595] 286. Method according to any of aspects 270 to 274 or 281 to 282, wherein in step b), the set, collection or library of nucleic acid sequences is screened for nucleic acid sequences that encode (i) an amino acid sequence that can bind to and/or has affinity for the BN-12 binding site on IL-6R and/or (ii) competes with BN-12 for binding to IL-6R.
[1596] 287. Method according to any of aspects 270 to 274, wherein in step b), the set, collection or library of nucleic acid sequences is screened for nucleic acid sequences that both (i) encode an amino acid sequence that can bind to and/or has affinity for the IL-6 binding site on IL-6R (and in particular against one or more of the 18 contact residues as described in Boulanger et al. 2003 (Science 300, 2101-2104) present in the extracellular D3 domain of the IL-6R, more particularly against amino acid residues Phe229 and Phe279 present in the extracellular D3 domain of the IL-6R) and/or (ii) competes with IL-6 for binding to IL-6R and that also (ii) encode an amino acid sequence that can bind to and/or has affinity for the gp130 binding site on IL-6R and/or the IL-6/IL-6R complex and/or (ii) an amino acid sequence that can compete with gp130 for binding to the IL-6/IL-6R complex.
[1597] 288. Method according to any of aspects 270 to 274, wherein in step b), the set, collection or library of nucleic acid sequences is screened for nucleic acid sequences that both (i) encode an amino acid sequence that can bind to and/or has affinity for the IL-6 binding site on IL-6R (and in particular against one or more of the 18 contact residues as described in Boulanger et al. 2003 (Science 300, 2101-2104) present in the extracellular D3 domain of the IL-6R, more particularly against amino acid residues Phe229 and Phe279 present in the extracellular D3 domain of the IL-6R) and/or (ii) competes with IL-6 for binding to IL-6R and that also (ii) encode an amino acid sequence that can bind to and/or has affinity for the M182 binding site on IL-6R and/or (ii) an amino acid sequence that can compete with M182 for binding to IL-6R.
[1598] 289. Method according to any of aspects 270 to 274, wherein in step b), the set, collection or library of nucleic acid sequences is screened for nucleic acid sequences that both (i) encode an amino acid sequence that can bind to and/or has affinity for the IL-6 binding site on IL-6R (and in particular against one or more of the 18 contact residues as described in Boulanger et al. 2003 (Science 300, 2101-2104) present in the extracellular D3 domain of the IL-6R, more particularly against amino acid residues Phe229 and Phe279 present in the extracellular D3 domain of the IL-6R) and/or (ii) competes with IL-6 for binding to IL-6R and that also (ii) encode an amino acid sequence that can bind to and/or has affinity for the BN-12 binding site on IL-6R and/or (ii) an amino acid sequence that can compete with BN-12 for binding to IL-6R.
[1599] 290. Method according to any of aspects 270 to 274, wherein in step b), the set, collection or library of nucleic acid sequences is screened for nucleic acid sequences that both (i) encode an amino acid sequence that can bind to and/or has affinity for the Tocilizumab (MRA) binding site on IL-BR and/or (ii) competes with Tocilizumab (MRA) for binding to IL-6R and that also (ii) encode an amino acid sequence that can bind to and/or has affinity for the gp130 binding site on IL-6R and/or the IL-6/IL-6R complex and/or (ii) an amino acid sequence that can compete with gp130 for binding to the IL-6/IL-6R complex.
[1600] 291. Method according to any of aspects 270 to 274, wherein in step b), the set, collection or library of nucleic acid sequences is screened for nucleic acid sequences that both (i) encode an amino acid sequence that can bind to and/or has affinity for the Tocilizumab (MRA) binding site on IL-6R and/or (ii) competes with Tocilizumab (MRA) for binding to IL-6R and that also (ii) encode an amino acid sequence that can bind to and/or has affinity for the M182 binding site on IL-6R and/or (ii) an amino acid sequence that can compete with M182 for binding to IL-6R.
[1601] 292. Method according to any of aspects 270 to 274, wherein in step b), the set, collection or library of nucleic acid sequences is screened for nucleic acid sequences that both (i) encode an amino acid sequence that can bind to and/or has affinity for the Tocilizumab (MRA) binding site on IL-6R and/or (ii) competes with Tocilizumab (MRA) for binding to IL-6R and that also (ii) encode an amino acid sequence that can bind to and/or has affinity for the BN-12 binding site on IL-6R and/or (ii) an amino acid sequence that can compete with BN-12 for binding to IL-6R.
[1602] 293. Method according to any of aspects 270 to 274, wherein in step b), the set, collection or library of nucleic acid sequences is screened for nucleic acid sequences that both (i) encode an amino acid sequence that can bind to and/or has affinity for the binding site for the reference IgG and the reference Fab on IL-6R and/or (ii) competes with the reference IgG and the reference Fab for binding to IL-6R and that also (ii) encode an amino acid sequence that can bind to and/or has affinity for the gp130 binding site on IL-6R and/or the IL-6/IL-6R complex and/or (ii) an amino acid sequence that can compete with gp130 for binding to the IL-6/IL-6R complex.
[1603] 294. Method according to any of aspects 270 to 274, wherein in step b), the set, collection or library of nucleic acid sequences is screened for nucleic acid sequences that both (i) encode an amino acid sequence that can bind to and/or has affinity for the binding site for the reference IgG and the reference Fab on IL-6R and/or (ii) competes with the reference IgG and the reference Fab for binding to IL-6R and that also (ii) encode an amino acid sequence that can bind to and/or has affinity for the M182 binding site on IL-6R and/or (ii) an amino acid sequence that can compete with M182 for binding to IL-6R.
[1604] 295. Method according to any of aspects 270 to 274, wherein in step b), the set, collection or library of nucleic acid sequences is screened for nucleic acid sequences that both (i) encode an amino acid sequence that can bind to and/or has affinity for the binding site for the reference IgG and the reference Fab on IL-6R and/or (ii) competes with the reference IgG and the reference Fab for binding to IL-6R and that also (ii) encode an amino acid sequence that can bind to and/or has affinity for the BN-12 binding site on IL-6R and/or (ii) an amino acid sequence that can compete with BN-12 for binding to IL-6R.
[1605] 296. Method according to any of aspects 270 to 274, wherein in step b), the set, collection or library of nucleic acid sequences is screened for nucleic acid sequences that both (i) encode an amino acid sequence that can bind to and/or has affinity for the BN-12 binding site on IL-6R (and in particular against one or more of the 18 contact residues as described in Boulanger et al. 2003 (Science 300, 2101-2104) present in the extracellular D3 domain of the IL-6R, more particularly against amino acid residues Phe229 and Phe279 present in the extracellular D3 domain of the IL-6R) and/or (ii) competes with BN-12 for binding to IL-6R and that also (ii) encode an amino acid sequence that can bind to and/or has affinity for the M182 binding site on IL-6R and/or (ii) an amino acid sequence that can compete with M182 for binding to IL-6R.
[1606] 297. Method according to any of aspects 287 to 296, wherein the screening in step b) is performed in a single step.
[1607] 298. Method according to aspect 287 to 296, wherein the screening in step b) is performed in subsequent steps.
[1608] 299. Method according to any of aspects 287 to 298, wherein the screening in step b) is performed in the presence of IL-6, Tocilizumab (MRA), gp130, M182 and/or BN-12.
[1609] 300. Method for screening for suitable and/or optimal linker lengths for linking a first and a second amino acid sequence in a multiparatopic (such as e.g. biparatopic, triparatopic, etc.) polypeptide or construct according to any of aspects 1 to 132, wherein said method comprises at least the steps of:
   [1610] a) providing a set, collection or library of nucleic acid sequences, in which each nucleic acid sequence in said set, collection or library encodes a fusion protein that comprises a first amino acid sequence that can bind to and/or has affinity for a first antigenic determinant, part, domain or epitope on IL-6R that is fused via a linker sequence to a second amino acid sequence that has can bind to and/or has affinity for a second antigenic determinant, part, domain or epitope on IL-6R (which may be the same or different as the first antigenic determinant, part, domain or epitope on IL-6), in which essentially each nucleic acid sequence (or most of these) encodes a fusion protein with a different linker sequence so as to provide a set, collection or library encoding different fusion proteins;
   [1611] b) screening said set, collection or library of nucleic acid sequences for nucleic acid sequences that encode an amino acid sequence that can bind to and/or has affinity for the first and second antigenic determinant, part, domain or epitope on IL-6R;
   [1612] and
   [1613] c) isolating the nucleic acid sequences that encode an amino acid sequence that can bind to and/or has affinity for the first and second antigenic determinant, part, domain or epitope on IL-6R, optionally followed by expressing the encoded amino acid sequence.
[1614] 301. Method according to aspect 300, wherein the first amino acid sequence is an amino acid sequence that can bind to and/or has affinity for the IL-6 binding site on IL-6R and/or is capable of competing with IL-6 for binding to IL-6R.
[1615] 302. Method according to aspect 300, wherein the first amino acid sequence is an amino acid sequence that can bind to and/or has affinity for the gp130 binding site on IL-6R and/or the IL-6/IL-6R complex and/or is capable of competing with gp130 for binding to the IL-6/IL-6R complex.
[1616] 303. Method according to aspect 300, wherein the first amino acid sequence is an amino acid sequence that can bind to and/or has affinity for the Tocilizumab (MRA) binding site on IL-6R and/or is capable of competing with Tocilizumab (MRA) for binding to IL-6R.
[1617] 304. Method according to aspect 300, wherein the first amino acid sequence is an amino acid sequence that can bind to and/or has affinity for the binding site for the reference IgG and the reference Fab on IL-6R and/or is capable of competing with the reference IgG and the reference Fab for binding to IL-6R.
[1618] 305. Method according to aspect 300, wherein the first amino acid sequence is an amino acid sequence that can bind to and/or has affinity for the M182 binding site on IL-6R and/or is capable of competing with M182 for binding to IL-6R.
[1619] 306. Method according to aspect 300, wherein the first amino acid sequence is an amino acid sequence that can bind to and/or has affinity for the BN-12 binding site on IL-6R and/or is capable of competing with BN-12 for binding to IL-6R.
[1620] 307. Method according to aspect 300, wherein the first amino acid sequence is an amino acid sequence that can bind to and/or has affinity for the IL-6 binding site on IL-6R and/or is capable of competing with IL-6 for binding to IL-6R and the second amino acid sequence is directed against the gp130 binding site on IL-6R or the IL-6/IL-6R complex and/or is capable of competing with gp130 for binding to the IL-6/IL-6R complex (or visa versa).
[1621] 308. Method according to aspect 300, wherein the first amino acid sequence is an amino acid sequence that can bind to and/or has affinity for the IL-6 binding site on IL-6R and/or is capable of competing with IL-6 for binding to IL-6R and the second amino acid sequence is directed against the M182 binding site on IL-6R and/or is capable of competing with M182 for binding to the IL-6R (or visa versa).
[1622] 309. Method according to aspect 300, wherein the first amino acid sequence is an amino acid sequence that can bind to and/or has affinity for IL-6 binding site on IL-6R and/or is capable of competing with IL-6 for binding to IL-6R and the second amino acid sequence is directed against the BN-12 binding site on IL-6R and/or is capable of competing with BN-12 for binding to the IL-6R (or visa versa).
[1623] 310. Method according to aspect 300, wherein the first amino acid sequence is an amino acid sequence that can bind to and/or has affinity for the Tocilizumab (MRA) binding site on IL-6R and/or is capable of competing with Tocilizumab (MRA) for binding to ft-6R and the second amino acid sequences is directed against the gp130 binding site on IL-6R and/or the IL-6/IL-6R complex and/or is capable of competing with gp130 for binding to the IL-6/IL-6R complex (or visa versa).
[1624] 311. Method according to aspect 300, wherein the first amino acid sequence is an amino acid sequence that can bind to and/or has affinity for the Tocilizumab (MRA) binding site on IL-6R and/or is capable of competing with Tocilizumab (MRA) for binding to IL-6R and the second amino acid sequences is directed against the M182 binding site on IL-6R and/or is capable of competing with M182 for binding to the IL-6R (or visa versa).
[1625] 312. Method according to aspect 300, wherein the first amino acid sequence is an amino acid sequence that can bind to and/or has affinity for the Tocilizumab (MRA) binding site on IL-6R and/or is capable of competing with Tocilizumab (MRA) for binding to IL-6R and the second amino acid sequences is directed against the BN-12 binding site on IL-6R and/or is capable of competing with BN-12 for binding to the IL-6R (or visa versa).
[1626] 313. Method according to aspect 300, wherein the first amino acid sequence is an amino acid sequence that can bind to and/or has affinity for the binding site for the reference IgG and the reference Fab on IL-6R and/or is capable of competing with the reference IgG and the reference Fab for binding to IL-6R and the second amino acid sequences is directed against the gp130 binding site on IL-6R and/or the IL-6/IL-6R complex and/or is capable of competing with gp130 for binding to the IL-6/IL-6R complex (or visa versa).
[1627] 314. Method according to aspect 300, wherein the first amino acid sequence is an amino acid sequence that can bind to and/or has affinity for the binding site for the reference IgG and the reference Fab on IL-6R and/or is capable of competing with the reference IgG and the reference Fab for binding to IL-6R and the second amino acid sequences is directed against the M182 binding site on IL-6R and/or is capable of competing with M182 for binding to the IL-6R (or visa versa).
[1628] 315. Method according to aspect 300, wherein the first amino acid sequence is an amino acid sequence that can bind to and/or has affinity for the binding site for the reference IgG and the reference Fab on IL-6R and/or is capable of competing the reference IgG and the reference Fab for binding to IL-6R and the second amino acid sequences is directed against the BN-12 binding site on IL-6R and/or is capable of competing with BN-12 for binding to the IL-6R (or visa versa).
[1629] 316. Method according to aspect 300, wherein the first amino acid sequence is an amino acid sequence that can bind to and/or has affinity for the BN-12 binding site on IL-6R and/or is capable of competing with BN-12 for binding to IL-6R and the second amino acid sequences is directed against the gp130 binding site on IL-6R or the IL-6/IL-6R complex and/or is capable of competing with gp130 for binding to the IL-6/IL-6R complex (or visa versa).
[1630] 317. Method according to aspect 300, wherein the first amino acid sequence is an amino acid sequence that can bind to and/or has affinity for the BN-12 binding site on IL-6R and/or is capable of competing with BN-12 for binding to IL-6R and the second amino acid sequence is directed against the M182 binding site on IL-6R and/or is capable of competing with M182 for binding to the IL-6R (or visa versa).
[1631] 318. Method according to any of aspects 300 to 317, wherein the screening in step b) is performed in a single step.
[1632] 319. Method according to any of aspects 300 to 317, wherein the screening in step b) is performed in subsequent steps.
[1633] 320. Method according to any of aspects 300 to 319, wherein the screening in step b) is performed in the presence of IL-6, Tocilizumab (MRA), gp130, M182 and/or BN-12.
[1634] 321. Method for preparing and/or generating a multiparatopic (such as e.g. biparatopic, triparatopic, etc.) polypeptide or construct according to any of aspects 1 to 132, said method comprising at least the steps of:
   [1635] a) providing a set, collection or library of nucleic acid sequences encoding amino acid sequences;
   [1636] b) screening said set, collection or library of nucleic acid sequences for a set, collection or library of nucleic acid sequences that encode an amino acid sequence that can bind to and/or has affinity for IL-6R;
   [1637] c) ligating said set, collection or library of nucleic acid sequences that encode an amino acid sequence that can bind to and/or has affinity for IL-6R to another nucleic acid sequence that encodes an amino acid sequence that can bind to and/or has affinity for IL-6R (e.g. a nucleic acid sequence that encodes an amino acid sequence that competes with IL-6 for binding IL-6R);
   [1638] and
   [1639] d) from the set, collection or library of nucleic acid sequences obtained in c), isolating the nucleic acid sequences encoding a biparatopic amino acid sequence that can bind to and/or has affinity for IL-6R (and e.g. further selecting for nucleic acid sequences that encode a biparatopic amino acid sequence that antagonizes with higher potency compared to the monovalent amino acid sequences), followed by expressing the encoded amino acid sequence.
[1640] 322. Method for preparing and/or generating multiparatopic (such as e.g. biparatopic, triparatopic, etc.) polypeptide or construct according to any of aspects 1 to 132, said method comprising at least the steps of:
   [1641] a) providing a first set, collection or library of nucleic acid sequences encoding amino acid sequences;
   [1642] b) screening said first set, collection or library of nucleic acid sequences for a nucleic acid sequence that encodes an amino acid sequence that can bind to and/or has affinity for a first antigenic determinant, part, domain or epitope on IL-6R;
   [1643] c) ligating the nucleic acid sequence encoding said amino acid sequence that can bind to and/or has affinity for a first antigenic determinant, part, domain or epitope on IL-6R obtained in b) to another set, collection or library of nucleic acid sequences encoding amino acid sequences to obtain a set, collection or library of nucleic acid sequences that encode fusion proteins;
   [1644] d) screening said set, collection or library of nucleic acid sequences obtained in step c) for a nucleic acid sequence that encodes an amino acid sequence that can bind to and has affinity for a second antigenic determinant, part, domain or epitope on IL-6R which is the same or different from the first antigenic determinant, part, domain or epitope on IL-6R;
   [1645] and
   [1646] e) isolating the nucleic acid sequence that encodes an amino acid sequence that can bind to and/or has affinity for the first and second antigenic determinant, part, domain or epitope on IL-6R, optionally followed by expressing the encoded amino acid sequence.
[1647] 323. Method according to aspect 322, wherein in step b), the set, collection or library of nucleic acid sequences is screened for nucleic acid sequences that encode a first amino acid sequence that (i) can bind to and/or has affinity for the IL-6 binding site on IL-6R (and in particular against one or more of the 18 contact residues as described in Boulanger et al. 2003 (Science 300, 2101-2104) present in the extracellular D3 domain of the IL-6R, more particularly against amino acid residues Phe229 and Phe279 present in the extracellular D3 domain of the IL-6R) and/or (ii) competes with IL-6 for binding to IL-6R.
[1648] 324. Method according to aspect 322, wherein in step b), the set, collection or library of nucleic acid sequences is screened for nucleic acid sequences that encode a first amino acid sequence that (i) can bind to and/or has affinity for the Tocilizumab (MRA) binding site on IL-6R and/or (ii) competes with Tocilizumab (MRA) for binding to IL-6R.
[1649] 325. Method according to aspect 322, wherein in step b), the set, collection or library of nucleic acid sequences is screened for nucleic acid sequences that encode a first amino acid sequence that (i) can bind to and/or has affinity for the binding site for the reference IgG and the reference Fab on IL-6R and/or (ii) competes with the reference IgG and the reference Fab for binding to IL-6R.
[1650] 326. Method according to aspect 322, wherein in step b), the set, collection or library of nucleic acid sequences is screened for nucleic acid sequences that encode a first amino acid sequence that (i) can bind to and/or has affinity for the BN-12 binding site on IL-6R and/or (ii) competes with BN-12 for binding to IL-6R.
[1651] 327. Method according to any of aspect 322 to 326, wherein in step d), the set, collection or library of nucleic acid sequences is screened for nucleic acid sequences that encode a second amino acid sequence that (i) can bind to and/or has affinity for the gp 130 binding site on IL-6R and/or the IL-6/IL-6R complex and/or (ii) that can compete with gp130 for binding to the IL-6/IL-6R complex.
[1652] 328. Method according to aspect 322 to 326, wherein in step d), the set, collection or library of nucleic acid sequences is screened for nucleic acid sequences that encode a second amino acid sequence that (i) can bind to and/or has affinity for the M182 binding site on IL-6R and/or (ii) that can compete with M182 for binding to IL-6R,
[1653] 329. Method according to aspect 322 to 326, wherein in step d), the set, collection or library of nucleic acid sequences is screened for nucleic acid sequences that encode a second amino acid sequence that (i) can bind to and/or has affinity for the BN-12 binding site on IL-6R and/or (ii) that can compete with BN-12 for binding to IL-6R.
[1654] 330. Method according to aspect 322, wherein in step b), the set, collection or library of nucleic acid sequences is screened for nucleic acid sequences that encode a first amino acid sequence that (i) can bind to and/or has affinity for the gp 130 binding site on IL-6R and/or the IL-6/IL-6R complex and/or (ii) that can compete with gp130 for binding to the IL-6/IL-6R complex.
[1655] 331. Method according to aspect 322, wherein in step b), the set, collection or library of nucleic acid sequences is screened for nucleic acid sequences that encode a first amino acid sequence that (i) can bind to and/or has affinity for the M182 binding site on IL-6R and/or (ii) that can compete with M182 for binding to IL-6R.
[1656] 332. Method according to aspect 322, wherein in step b), the set, collection or library of nucleic acid sequences is screened for nucleic acid sequences that encode a first amino acid sequence that (i) can bind to and/or has affinity for the BN-12 binding site on IL-6R and/or (ii) competes with BN-12 for binding to IL-6R.
[1657] 333. Method according to aspect 322 or 330 to 332, wherein in step d), the set, collection or library of nucleic acid sequences is screened for nucleic acid sequences that encode a second amino acid sequence that (i) can bind to and/or has affinity for the IL-6 binding site on IL-6R (and in particular against one or more of the 18 contact residues as described in Boulanger et al. 2003 (Science 300, 2101-2104) present in the extracellular D3 domain of the IL-6R, more particularly against amino acid residues Phe229 and Phe279 present in the extracellular D3 domain of the IL-6R) and/or (ii) competes with IL-6 for binding to IL-6R.
[1658] 334. Method according to aspect 322 or 330 to 332, wherein in step d), the set, collection or library of nucleic acid sequences is screened for nucleic acid sequences that encode a second amino acid sequence that (i) can bind to and/or has affinity for the Tocilizumab (MRA) binding site on IL-6R and/or (ii) competes with Tocilizumab (MRA) for binding to IL-6R.
[1659] 335. Method according to aspect 322 or 330 to 332, wherein in step d), the set, collection or library of nucleic acid sequences is screened for nucleic acid sequences that encode a second amino acid sequence that (i) can bind to and/or has affinity for the binding site for the reference IgG and the reference Fab on IL-6R and/or (ii) competes with the reference IgG and the reference Fab for binding to IL-6R.
[1660] 336. Method according to aspect 322 or 330 to 332, wherein in step d), the set, collection or library of nucleic acid sequences is screened for nucleic acid sequences that encode a second amino acid sequence that (i) can bind to and/or has affinity for the BN-12 binding site on IL-6R and/or (ii) that can compete with BN-12 for binding to IL-6R.
[1661] 337. Method according to aspect 322, wherein in step b), the set, collection or library of nucleic acid sequences is screened nucleic acid sequences that encode a first amino acid sequence that (i) can bind to and/or has affinity for the IL-6 binding site on IL-6R (and in particular against one or more of the 18 contact residues as described in Boulanger et al. 2003 (Science 300, 2101-2104) present in the extracellular D3 domain of the IL-6R, more particularly against amino acid residues Phe229 and Phe279 present in the extracellular D3 domain of the IL-6R) and/or (ii) competes with IL-6 for binding to IL-6R and wherein in step d), the set, collection or library of nucleic acid sequences is screened for nucleic acid sequences that encode a second amino acid sequence that (i) can bind to and/or has affinity for the gp 130 binding site on IL-6R and/or the IL-6/IL-6R complex and/or (ii) that can compete with gp130 for binding to the IL-6/IL-6R complex (or visa versa).
[1662] 338. Method according to aspect 322, wherein in step b), the set, collection or library of nucleic acid sequences is screened nucleic acid sequences that encode a first amino acid sequence that (i) can bind to and/or has affinity for the IL-6 binding site on IL-6R (and in particular against one or more of the 18 contact residues as described in Boulanger et al. 2003 (Science 300, 2101-2104) present in the extracellular D3 domain of the IL-6R, more particularly against amino acid residues Phe229 and Phe279 present in the extracellular D3 domain of the IL-6R) and/or (ii) competes with IL-6 for binding to IL-6R and wherein in step d), the set, collection or library of nucleic acid sequences is screened for nucleic acid sequences that encode a second amino acid sequence that (i) can bind to and/or has affinity for the M182 binding site on IL-6R and/or (ii) that can compete with M182 for binding to IL-6R (or visa versa).
[1663] 339. Method according to aspect 322, wherein in step b), the set, collection or library of nucleic acid sequences is screened nucleic acid sequences that encode a first amino acid sequence that (i) can bind to and/or has affinity for the IL-6 binding site on IL-6R (and in particular against one or more of the 18 contact residues as described in Boulanger et al. 2003 (Science 300, 2101-2104) present in the extracellular D3 domain of the IL-6R, more particularly against amino acid residues Phe229 and Phe279 present in the extracellular D3 domain of the IL-6R) and/or (ii) competes with IL-6 for binding to IL-6R and wherein in step d), the set, collection or library of nucleic acid sequences is screened for nucleic acid sequences that encode a second amino acid sequence that (i) can bind to and/or has affinity for the BN-12 binding site on IL-6R and/or (ii) that can compete with BN-12 for binding to IL-6R (or visa versa).
[1664] 340. Method according to aspect 322 wherein in step b), the set, collection or library of nucleic acid sequences is screened nucleic acid sequences that encode a first amino acid sequence that (i) can bind to and/or has affinity for the Tocilizumab (MRA) binding site on IL-6R and/or (ii) competes with Tocilizumab (MRA) for binding to IL-6R and wherein in step d), the set, collection or library of nucleic acid sequences is screened for nucleic acid sequences that encode a second amino acid sequence that (i) can bind to and/or has affinity for the gp 130 binding site on IL-6R and/or the IL-6/IL-6R complex and/or (ii) that can compete with gp130 for binding to the IL-6/IL-6R complex (or visa versa).
[1665] 341. Method according to aspect 322, wherein in step b), the set, collection or library of nucleic acid sequences is screened nucleic acid sequences that encode a first amino acid sequence that (i) can bind to and/or has affinity for the Tocilizumab (MRA) binding site on IL-6R and/or (ii) competes with Tocilizumab (MRA) for binding to IL-6R and wherein in step d), the set, collection or library of nucleic acid sequences is screened for nucleic acid sequences that encode a second amino acid sequence that (i) can bind to and/or has affinity for the M182 binding site on IL-6R and/or (ii) that can compete with M182 for binding to IL-6R (or visa versa).
[1666] 342. Method according to aspect 322, wherein in step b), the set, collection or library of nucleic acid sequences is screened nucleic acid sequences that encode a first amino acid sequence that (i) can bind to and/or has affinity for the Tocilizumab (MRA) binding site on IL-6R and/or (ii) competes with Tocilizumab (MRA) for binding to IL-6R and wherein in step d), the set, collection or library of nucleic acid sequences is screened for nucleic acid sequences that encode a second amino acid sequence that (i) can bind to and/or has affinity for the BN-12 binding site on IL-6R and/or (ii) that can compete with BN-12 for binding to IL-6R (or visa versa).
[1667] 343. Method according to aspect 322 wherein in step b), the set, collection or library of nucleic acid sequences is screened nucleic acid sequences that encode a first amino acid sequence that (i) can bind to and/or has affinity for the binding site for the reference IgG and reference Fab on IL-6R and/or (ii) competes with the reference IgG and reference Fab for binding to IL-6R and wherein in step d), the set, collection or library of nucleic acid sequences is screened for nucleic acid sequences that encode a second amino acid sequence that (i) can bind to and/or has affinity for the gp 130 binding site on IL-6R and/or the IL-6/IL-6R complex and/or (ii) that can compete with gp130 for binding to the IL-6/IL-6R complex (or visa versa).
[1668] 344. Method according to aspect 322, wherein in step b), the set, collection or library of nucleic acid sequences is screened nucleic acid sequences that encode a first amino acid sequence that (i) can bind to and/or has affinity for the binding site for the reference IgG and reference Fab on IL-6R and/or (ii) competes with the reference IgG and reference Fab for binding to IL-6R and wherein in step d), the set, collection or library of nucleic acid sequences is screened for nucleic acid sequences that encode a second amino acid sequence that (i) can bind to and/or has affinity for the M182 binding site on IL-6R and/or (ii) that can compete with M182 for binding to IL-6R (or visa versa).
[1669] 345. Method according to aspect 322, wherein in step b), the set, collection or library of nucleic acid sequences is screened nucleic acid sequences that encode a first amino acid sequence that (i) can bind to and/or has affinity for the binding site for the reference IgG and reference Fab on IL-6R and/or (ii) competes with the reference IgG and reference Fab for binding to IL-6R and wherein in step d), the set, collection or library of nucleic acid sequences is screened for nucleic acid sequences that encode a second amino acid sequence that (i) can bind to and/or has affinity for the BN-12 binding site on IL-6R and/or (ii) that can compete with BN-12 for binding to IL-6R (or visa versa).
[1670] 346. Method according to aspect 322, wherein in step b), the set, collection or library of nucleic acid sequences is screened nucleic acid sequences that encode a first amino acid sequence that (i) can bind to and/or has affinity for the BN-12 binding site on IL-6R and/or (ii) competes with BN-12 for binding to IL-6R and wherein in step d), the set, collection or library of nucleic acid sequences is screened for nucleic acid sequences that encode a second amino acid sequence that (i) can bind to and/or has affinity for the gp 130 binding site on IL-6R and/or the IL-6/IL-6R complex and/or (ii) that can compete with gp130 for binding to the IL-6/IL-6R complex (or visa versa).
[1671] 347. Method according to aspect 322, wherein in step b), the set, collection or library of nucleic acid sequences is screened nucleic acid sequences that encode a first amino acid sequence that (i) can bind to and/or has affinity for the BN-12 binding site on IL-6R and/or (ii) competes with BN-12 for binding to IL-6R and wherein in step d), the set, collection or library of nucleic acid sequences is screened for nucleic acid sequences that encode a second amino acid sequence that (i) can bind to and/or has affinity for the M182 binding site on IL-6R and/or (ii) that can compete with M182 for binding to IL-6R (or visa versa).
[1672] 348. Method according to any of aspects 322 to 347, wherein the screening in steps b) and/or d) is performed in the presence of IL-6, Tocilizumab (MRA), gp130, M182 and/or BN-12.
[1673] 349. Method for preparing and/or generating a multiparatopic (such as e.g. biparatopic, triparatopic, etc.) polypeptide or constructs according to any of aspects 1 to 132, said method comprising at least the steps of linking two or more monovalent amino acid sequences according to any of aspects 133 to 186, monovalent Nanobodies according to any of aspects 187 to 197 and/or monovalent constructs according to any of aspects 238 to 241 and for example one or more linkers.
[1674] 350. Method according to aspect 349, comprising the steps of:
   [1675] a) linking two or more nucleic acid sequences according to aspect 266, encoding a monovalent amino acid sequence according to any of aspects 133 to 186, a monovalent Nanobody according to any of aspects 187 to 197 and/or a monovalent construct according to any of aspects 238 to 241 (and also for example nucleic acids encoding one or more linkers and further one or more further elements of genetic constructs known per se) to obtain a genetic construct according to aspect 267;
   [1676] b) expressing, in a suitable host cell or host organism or in another suitable expression system, the genetic construct obtained in a)
   [1677] optionally followed by:
   [1678] c) isolating and/or purifying the multiparatopic (such as e.g. biparatopic, triparatopic, etc.) polypeptide or construct according to any of aspects 1 to 132 thus obtained.
[1679] 351. Host or host cell that expresses, or that under suitable circumstances is capable of expressing, an amino acid sequence according to any of aspects 133 to 186, a Nanobody according to any of aspects 187 to 197, a polypeptide according to any of aspects 1 to 132 and 198 to 216, a compound or construct according to any of aspects 217 to 237 that is such that it can be obtained by expression of a nucleic acid or nucleotide sequence encoding the same, or a monovalent construct according to any of aspects 238 to 241; and/or that comprises a nucleic acid or nucleotide sequence according to aspect 266 or a genetic construct according to aspect 267.
[1680] 352. Composition comprising at least one amino acid sequence according to any of aspects 133 to 186, Nanobody according to any of aspects 187 to 197, polypeptide according to any of aspects 1 to 132 and 198 to 216, compound or construct according to any of aspects 217 to 237, monovalent construct according to any of aspects 238 to 241, or nucleic acid or nucleotide sequence according to aspects 266 or 267.
[1681] 353. Composition according to aspect 352, which is a pharmaceutical composition.
[1682] 354. Composition according to aspect 353, which is a pharmaceutical composition, that further comprises at least one pharmaceutically acceptable carrier, diluent or excipient and/or adjuvant, and that optionally comprises one or more further pharmaceutically active polypeptides and/or compounds.
[1683] 355. Method for producing an amino acid sequence according to any of aspects 133 to 186, a Nanobody according to any of aspects 187 to 197, a polypeptide according to any of aspects 1 to 132 and 198 to 216, a compound or construct according to any of aspects 217 to 237 that is such that it can be obtained by expression of a nucleic acid or nucleotide sequence encoding the same, or a monovalent construct according to any of aspects 238 to 241, said method at least comprising the steps of:
   [1684] a) expressing, in a suitable host cell or host organism or in another suitable expression system, a nucleic acid or nucleotide sequence according to aspect 266, or a genetic construct according to aspect 267;
   [1685] optionally followed by:
   [1686] b) isolating and/or purifying the amino acid sequence according to any of aspects 133 to 186, the Nanobody according to any of aspects 187 to 197, the polypeptide according to any of aspects 1 to 132 and 198 to 216, the compound or construct according to any of aspects 217 to 237, or the monovalent construct according to any of aspects 238 to 241 thus obtained.
[1687] 356. Method for producing an amino acid sequence according to any of aspects 133 to 186, a Nanobody according to any of aspects 187 to 197, a polypeptide according to any of aspects 1 to 132 and 198 to 216, a compound or construct according to any of aspects 217 to 237 that is such that it can be obtained by expression of a nucleic acid or nucleotide sequence encoding the same, or a monovalent construct according to any of aspects 238 to 241, said method at least comprising the steps of:
   [1688] a) cultivating and/or maintaining a host or host cell according to aspect 351 under conditions that are such that said host or host cell expresses and/or produces at least one amino acid sequence according to any of aspects 133 to 186, Nanobody according to any of aspects 187 to 197, a polypeptide according to any of aspects 1 to 132 and 198 to 216, a compound or construct according to any of aspects 217 to 237, or monovalent construct according to any of aspects 238 to 241;
   [1689] optionally followed by:
   [1690] b) isolating and/or purifying the amino acid sequence according to any of aspects 133 to 186, Nanobody according to any of aspects 187 to 197, polypeptide according to any of aspects 1 to 132 and 198 to 216, compound or construct according to any of aspects 217 to 237, or monovalent construct according to any of aspects 238 to 241 thus obtained.
[1691] 357. Method for screening amino acid sequences directed against IL-6R that comprises at least the steps of:
   [1692] a) providing a set, collection or library of nucleic acid sequences encoding amino acid sequences;
   [1693] b) screening said set, collection or library of nucleic acid sequences for nucleic acid sequences that encode an amino acid sequence that can bind to and/or has affinity for IL-6R and that is cross-blocked or is cross blocking a Nanobody of the invention, e.g. SEQ ID NO: 132-216 (Table-A-3), or a polypeptide or construct of the invention, e.g. SEQ ID NO: 812-947 (see Table A-4, A-5 and A-6); and
   [1694] c) isolating said nucleic acid sequence, followed by expressing said amino acid sequence.
[1695] 358. Method for the prevention and/or treatment of at least one IL-6R related disease or disorder, said method comprising administering, to a subject in need thereof, a pharmaceutically active amount of at least one amino acid sequence according to any of aspects 133 to 186, Nanobody according to any of aspects 187 to 197, polypeptide according to any of aspects 1 to 132 and 198 to 216, compound or construct according to any of aspects 217 to 237, monovalent construct according to any of aspects 238 to 241; or composition according to aspect 353 or 354.
[1696] 359. Method for the prevention and/or treatment of at least one disease or disorder that is associated with IL-6R, with its biological or pharmacological activity, and/or with the biological pathways or signalling in which IL-6R is involved, said method comprising administering, to a subject in need thereof, a pharmaceutically active amount of at least one amino acid sequence according to any of aspects 133 to 186, Nanobody according to any of aspects 187 to 197, polypeptide according to any of aspects 1 to 132 and 198 to 216, compound or construct according to any of aspects 217 to 237, monovalent construct according to any of aspects L238 to 241; or composition according to aspect 353 or 354.
[1697] 360. Method for the prevention and/or treatment of at least one disease or disorder that can be prevented and/or treated by administering, to a subject in need thereof, at least one amino acid sequence according to any of aspects 133 to 186, Nanobody according to any of aspects 187 to 197, polypeptide according to any of aspects 1 to 132 and 198 to 216, compound or construct according to any of aspects 217 to 237, monovalent construct according to any of aspects 238 to 241; or composition according to aspect 2532 or 254, said method comprising administering, to a subject in need thereof, a pharmaceutically active amount of at least one at least one amino acid sequence according to any of aspects 133 to 186, Nanobody according to any of aspects 187 to 197, polypeptide according to any of aspects 1 to 132 and 198 to 216, compound or construct according to any of aspects 217 to 237, monovalent construct according to any of aspects 238 to 241; or composition according to aspect 253 or 254.
[1698] 361. Method for immunotherapy, said method comprising administering, to a subject in need thereof, a pharmaceutically active amount of at least one amino acid sequence according to any of aspects 133 to 186, Nanobody according to any of aspects 187 to 197, polypeptide according to any of aspects 1 to 132 and 198 to 216, compound or construct according to any of aspects 217 to 237, monovalent construct according to any of aspects 238 to 241; or composition according to aspect 253 or 254.
[1699] 362. Use of an amino acid sequence according to any of aspects 133 to 186, a Nanobody according to any of aspects 187 to 197, a polypeptide according to any of aspects 1 to 133 and 198 to 216, a compound or construct according to any of aspects 217 to 237, or a monovalent construct according to any of aspects 238 to 241 in the preparation of a pharmaceutical composition for prevention and/or treatment of at least one IL-6R related disease or disorder; and/or for use in one or more of the methods according to aspects 358 to 361.
[1700] 363. Amino acid sequence according to any of 133 to 186, Nanobody according to any of aspects 187 to 197, polypeptide according to any of aspects 1 to 132 and 198 to 216, compound or construct according to any of aspects 217 to 237, monovalent construct according to any of aspects 238 to 241; or composition according to aspect 253 or 254 for the prevention and/or treatment of at least one IL-6R related disease or disorder.
[1701] 364. Part or fragment of an amino acid sequence according to any of aspects 133 to 186, or of a Nanobody according to any of aspects 187 to 197.
[1702] 365. Part or fragment according to aspect 3641, that can specifically bind to IL-6R.
[1703] 366. Part of fragment according to any of aspects 364 or 365, that can specifically bind to IL-6R with a dissociation constant (K_{D}) of 10⁻⁵ to 10⁻¹² moles/litre or less, and preferably 10⁻⁷ to 10⁻¹² moles/litre or less and more preferably 10⁻⁸ to 10⁻¹² moles/litre.
[1704] 367. Part or fragment according to any of aspects 364 to 366, that can specifically bind to IL-6R with a rate of association (kₒₙ-rate) of between 10² M⁻¹s⁻¹ to about 10⁷ M⁻¹s⁻¹, preferably between 10³ M⁻¹s⁻¹ and 10⁷ M⁻¹s⁻¹, more preferably between 10⁴ M⁻¹s⁻¹ and 10⁷ M⁻¹s⁻¹, such as between 10⁵ M⁻¹s⁻¹ and 10⁷ M⁻¹s⁻¹.
[1705] 368. Part or fragment according to any of aspects 364 to 367, that can specifically bind to IL-6R with a rate of dissociation (k_{off} rate) between 1 s⁻¹ and 10⁻⁶ s⁻¹ preferably between 10⁻² s⁴ and 10⁻⁶ s⁻¹, more preferably between 10⁻³ s⁻¹ and 10⁻⁶ s⁻¹, such as between 10⁻⁴ s⁻¹ and 10⁻⁶ s⁻¹.
[1706] 369. Compound or construct, that comprises or essentially consists of one or more parts or fragments according to any of aspects 364 to 368, and optionally further comprises one or more other groups, residues, moieties or binding units, optionally linked via one or more linkers,
[1707] 370. Compound or construct according to aspect 369, in which said one or more other groups, residues, moieties or binding units are amino acid sequences.
[1708] 371. Compound or construct according to aspect 369 or 370, in which said one or more linkers, if present, are one or more amino acid sequences.
[1709] 372. Nucleic acid or nucleotide sequence, that encodes a part or fragment according to any of aspects 364 to 368 or a compound or construct according to any of aspects 369 to 371.
[1710] 373. Composition, comprising at least one part or fragment according to any of aspects 364 to 368, compound or construct according to any of aspects 369 to 371, or nucleic acid or nucleotide sequence according to aspect 372.
[1711] 374. Derivative of a polypeptide according to any of aspects 1 to 132, an amino acid sequence according to any of aspects 133 to 186, or of a Nanobody according to any of aspects 187 to 197.
[1712] 375. Derivative according to aspect 374, that can specifically bind to IL-6R.
[1713] 376. Derivative according to any of aspects 374 or 375, that can specifically bind to IL-6R with a dissociation constant (K_{D}) of 10⁻⁵ to 10⁻¹² moles/litre or less, and preferably 10⁻⁷ to 10^{.12} moles/litre or less and more preferably 10⁻⁸ to 10⁻¹² moles/litre.
[1714] 377. Derivative according to any of aspects 374 to 376, that can specifically bind to IL-6R with a rate of association (kₒₙ-rate) of between 10² M⁻¹s⁻¹ to about 10⁷ M⁻¹s⁻¹, preferably between 10³ M⁻¹s⁻¹ and 10⁷ M⁻¹s⁻¹, more preferably between 10⁴ M⁻¹s⁻¹ and 10⁷ M⁻¹s⁻¹, such as between 10⁵ M⁻¹s⁻¹ and 10⁷ M⁻¹s⁻¹.
[1715] 378. Derivative according to any of aspects 374 to 377, that can specifically bind to IL-6R with a rate of dissociation (k_{aff} rate) between 1 s⁻¹ and 10⁻⁶ s⁻¹ preferably between 10⁻² s⁻¹ and 10⁻⁶ s⁻¹, more preferably between 10⁻³ s⁻¹ and 10⁶ s⁻¹, such as between 10⁻⁴ s⁻¹ and 10⁻⁶ s⁻¹.
[1716] 379. Derivative of a polypeptide according to any of aspects 198 to 216 or compound or construct according to any of aspects 217 to 237.
[1717] 380. Derivative according to aspect 379, that can specifically bind to IL-6R.
[1718] 381. Derivative according to any of aspects 379 or 380, that can specifically bind to IL-6R with a dissociation constant (K_{D}) of 10⁻⁵ to 10⁻¹² moles/liter or less, and preferably 10⁻⁷ to 10⁻¹² moles/liter or less and more preferably 10⁻⁸ to 10⁻¹² moles/liter.
[1719] 382. Derivative according to any of aspects 379 to 381, that can specifically bind to IL-6R with a rate of association (kₒₙ-rate) of between 10² M⁻¹s⁻¹ to about 10⁷ M⁻¹s⁻¹, preferably between 10³ M⁻¹s⁻¹ and 10⁷M⁻¹s⁻¹, more preferably between 10⁴ M⁻¹s⁻¹ and 10⁷ M⁻¹s⁻¹, such as between 10⁵ M⁻¹s⁻¹ and 10⁷ M⁻¹s⁻¹.
[1720] 383. Derivative according to any of aspects 379 to 382, that can specifically bind to IL-6R with a rate of dissociation (k_{off} rate) between 1 s⁻¹ and 10⁻⁶ s⁻¹ preferably between 10⁻² s⁻¹ and 10⁻⁶ s⁻¹, more preferably between 10⁻³ s⁻¹ and 10⁻⁶ s⁻¹, such as between 10⁻⁴ s⁻¹ and 10⁻⁶ s⁻¹.
[1721] 384. Derivative according to any of aspects 374 to 383, that has a serum half-life that is at least 1.5 times, preferably at least 2 times, such as at least 5 times, for example at least 10 times or more than 20 times, greater than the half-life of the corresponding amino acid sequence according to any of aspects 133 to 186 per se, Nanobody according to any of aspects 187 to 197 per se, polypeptide according to any of aspects 1 to 132 and 198 to 216 per se or compound or construct according to any of aspects 217 to 237 per se.
[1722] 385. Derivative according to any of aspects 374 to 384, that has a serum half-life that is increased with more than 1 hours, preferably more than 2 hours, more preferably more than 6 hours, such as more than 12 hours, or even more than 24, 48 or 72 hours, compared to the corresponding amino acid sequence according to any of aspects 133 to 186 per se, Nanobody according to any of aspects 187 to 197 per se, polypeptide according to any of aspects 1 to 132 and 198 to 216 per se or compound or construct according to any of aspects 217 to 237 per se, respectively.
[1723] 386. Derivative according to any of aspects 374 to 385, that has a serum half-life in human of at least about 12 hours, preferably at least 24 hours, more preferably at least 48 hours, even more preferably at least 72 hours or more; for example, at least 5 days (such as about 5 to 10 days), preferably at least 9 days (such as about 9 to 14 days), more preferably at least about 10 days (such as about 10 to 15 days), or at least about 11 days (such as about 11 to 16 days), more preferably at least about 12 days (such as about 12 to 18 days or more), or more than 14 days (such as about 14 to 19 days).
[1724] 387. Derivative according to any of aspects 374 to 386, that is a pegylated derivative.
[1725] 388. Compound or construct, that comprises or essentially consists of one or more derivatives according to any of aspects 374 to 387, and optionally further comprises one or more other groups, residues, moieties or binding units, optionally linked via one or more linkers.
[1726] 389. Compound or construct according to aspect 388, in which said one or more other groups, residues, moieties or binding units are amino acid sequences.
[1727] 390. Compound or construct according to aspect 388, in which said one or more linkers, if present, are one or more amino acid sequences.
[1728] 391. Nucleic acid encoding a compound or construct according to aspect 389 or 390.
[1729] 392. Composition, comprising at least one derivative to any of aspects 374 to 387, compound or construct according to any of aspects 388 to 390, or nucleic acid or nucleotide sequence according to aspect 391.

### EXAMPLES

### Example 1

### Materials

[1730] Human IL-6 was obtained from eBioscience (San Diego, Calif.) as a recombinant protein produced in E. coli.

[1731] Human bio-IL-6 was obtained from eBioscience (San Diego, Calif.) as human IL6 biotinylated by PE (6 biotins/molecule).

[1732] Human soluble IL-6R was obtained from Peprotech (Rocky Hill, N.J.) as a recombinant protein produced in HEK293 cells and from R&D Systems (Minneapolis, Minn.) as a recombinant protein produced in Sf21 cells.

[1733] MAb BR-6 is a neutralizing anti-IL-6R monoclonal antibody obtained from Diaclone.

[1734] MAb BN-12 is a non-neutralizing anti-IL-6R monoclonal antibody obtained from Diaclone.

[1735] MAb M182 is a biotinylated anti-IL-6R monoclonal antibody obtained from BD Biosciences (San Jose, Calif.).

[1736] Llama IgG (h&l) antibody HRP (horse radish peroxidase) conjugated is a polyclonal antibody against llama IgG raised in goat obtained from Bethyl Labs (Montgomery, Tex.).

[1737] BAF206 is a biotinylated anti-human IL-6 polyclonal antibody from R&D Systems (Minneapolis, Minn.).

[1738] BAF227 is a biotinylated anti-IL-6R polyclonal antibody from R&D Systems (Minneapolis, Minn.).

[1739] Two representative anti-human IL-6R immunoglobulins described in EP 0 628 639 (a Fab fragment and a full-sized IgG) were generated and used as reference compounds. The Fab fragment and full-sized IgG were constructed based on the L-chain called “RV_{L}a” (see EP 0 628 639 B1, Table 2, version (a)) and the H-chain called “RV_{H}f” (see EP 0 628 639 B1, Table 3, version (f)). These particular L-chain and H-chain were chosen for the purposes of constructing the reference compounds because, according to EP 0 268 639 B1 (see for example paragraph [0074]), a reshaped human antibody comprising said L-chain and said H-chain exhibited an ability to bind to human IL-6R at the same level as PM1, a mouse monoclonal antibody against human IL-6R (see again EP 0 628 639 B1, paragraph [009] and the further references cited therein).

[1740] The full-length reference IgG consisted of the amino acid sequences of SEQ ID NO: 126 (heavy chain) and SEQ ID NO: 127 (light chain). The Fab fragment consisted of the amino acid sequences of SEQ ID NO: 128 (heavy chain regions V_{L}b and V_{H}f fused to the CH1 region of human IgG1) and SEQ ID NO: 129 (reshaped human PM-1 variable light chain fused to human Ckappa).

[1741] Encoding DNA fragments were generated by assembly PCR using partially overlapping oligonucleotides. PCR products were cloned into a single, bi-cistronic vector which enables expression of functional, disulphide-linked Fab fragments in the periplasm of E. coli. Full-length IgG was produced in CHO cells transfected with 2 expression vectors containing the genes for the light and heavy chains. The gene encoding the heavy chain was created by fusing V_{H}f to the constant region of human IgG1. The light chain was as described in EP 0 628 639.

### Example 2

### Generation of a Cell Lines Expressing Human IL-6R and Cyno IL-6R

[1742] The complete codon-optimized DNA sequence of human IL-6R was synthesized by Geneart (Regensburg, Germany) and cloned into pcDNA3.1 Hygro (+) (Invitrogen, Carlsbad, Calif.). The resulting plasmid was transfected into camelid kidney cells and CHO-K1 cells. The transfected cell pool was kept under selection pressure (100 μg/ml Hygromycin for the camelid kidney cells and 400 μg/ml for CHO cells) from day two after transfection. Twenty-eight days later, an IL-6R positive population was sorted with the use of anti-IL-6R monoclonal antibody BR-6 (FACS aria). Single cells were seeded into 96-well cell culture plates. Growing clones were tested for IL-6R expression on a FACS array device with the use of anti-IL-6R monoclonal antibody BR-6. Clones HuIL6R 2F1 (camelid kidney cells) and HuIL6R 4D6 (CHO-K1 cells) were selected for further use.

[1743] A codon-optimized DNA sequence encoding the amino acid sequence of the extracellular domain of cyno IL-6R (as described by Imazeki et al, 1998, International Journal of Immunopharmacology 20: 345-357) combined with the human-rhesus amino acid sequence for the transmembrane and intracellular region of IL-6R, was assembled using overlapping oligonucleotides.

[1744] The resulting plasmid was transfected into CHO-K1 cells. The transfected cell pool was kept under selection pressure (1 mg/ml G418) from day two after transfection. Twenty days later, an IL-6R positive population was sorted with the use of anti-IL6R monoclonal antibody BR-6 (FACS aria). Single cells were seeded into 96-well cell culture plates. Growing clones were tested for IL-6R expression on a FACS array device with the use of anti-IL-6R monoclonal antibody BR-6. Clone CyIL6R 405 (CHO-K1 cells) was selected for further use.

### Example 3

### Expression and Purification of Hybrid IL-6R

[1745] The ectodomain of IL-6R is composed of 3 subdomains. Only subdomains II and III interact with IL-6. To map the domain(s) to which a particular Nanobody binds, we constructed a hybrid IL-6R molecule consisting of the 6×His-tagged ectodomain of human IL-6R, except a majority of domain I, which was replaced by the Rat IL-6R sequence (the rat IL-6R sequence differs drastically from the human IL-6R sequence). The amino acid sequence of hybrid IL-6R is depicted in FIG. 1 (SEQ ID NO: 131).

[1746] The complete codon-optimized DNA sequence of hybrid IL-6R was synthesized by Geneart and cloned into an expression plasmid. The resulting plasmid was transfected into HEK.EBNA cells (adapted to animal-component-free Pro293a culture medium; Lanza, Basel, Switzerland) using a standard transfection method. Supernatant was harvested and refreshed each 2-3 days for 14 days. The pool of supernants was applied to a Source 30S column. Hybrid IL-6R eluted between 150 and 500 mM NaCl. This elution fraction was further purified to homogeneity consecutively by Histrap chromatography and superdex200 10/300 GL chromatography.

### Example 4

### Immunizations

[1747] Three llamas (128, 129 and 130) were immunized with clone HuIL6R 2F1 according to the scheme outlined in Table C-1.

[1748] After completion of the protocol, immune responses were analyzed by FACS (FACS array): serial dilutions (starting dilution: 1/250) of serum samples collected at days 0, 14, 28, 35, 44, 49, 53 were incubated with CHO-K1 clone 406. Bound llama IgG was detected by goat anti-Llama IgG (Bethyl A160-100; Montgomery, Tex.). Results are shown in FIG. 2 (a-c).

### Example 5

### Library Construction

[1749] RNA extracted from peripheral blood lymphocytes (PBL) and lymph node (LN) obtained from llama 128b, 129b and 130b was used as starting material for RT-PCR to amplify Nanobody encoding gene fragments. These fragments were cloned into a phagemid vector. Phage was prepared according to standard methods and stored after filter sterilization at 4° C. for further use. The characteristics of the constructed libraries are shown in Table C-2.

### Example 6

### Selections

[1750] Selections were carried out with the above libraries using various conditions as summarized in Table C-3.

[1751] Two rounds of selection were performed: two times the same experimental condition or combining two different conditions. Each selection output was analyzed for enrichment factor (# phage present in eluate relative to control) and plated for further analyses. Colonies were picked, grown in 96-well plates and stored in 20% glycerol in −80 C. Copies of the output plates were grown in 96 deep well plates (1 ml volume) and induced by adding IPTG for Nanobody expression. Periplasmic extracts (volume: ˜90 μl) were prepared according to standard methods (see for example the prior art and applications filed by Ablynx N.V. cited herein).

### Example 7

### Screening

[1752] Periplasmic extracts were analyzed for their ability to inhibit the IL-6/IL-6R interaction. To this end, two independent Alphascreen assays were set up which are depicted schematically in FIG. 3. In assay 1, the periplasmic extracts were incubated with biotinylated IL-6 (3.3 nM), soluble IL-6 receptor (0.4 nM), streptavidin coated donor beads and MAb BN-12 coated acceptor beads (20 mg/ml). Nanobodies positive in this assay could either inhibit the IL-6/IL-6R interaction or the IL-6R/MAb BN-12 interaction. To discriminate between these 2 possibilities, a second assay was set up (Assay 2). In this assay the periplasmic extract were incubated with bio-IL-6R (0.1 nM), streptavidin coated donor beads and MAb BN-12 coated acceptor beads (10 μg/ml). Nanobodies positive in assay 1 but negative in assay 2 were considered as IL-6/IL-6R inhibitors. Periplasmic extracts were diluted 25-fold in both assays which corresponds roughly to a final concentration of 40 nM.

[1753] This resulted in two different subclasses of anti-IL-6R Nanobodies:
[1754] Subclass 1: Nanobodies against 1-L6R that were capable of modulating (e.g. partially or fully reducing or preventing) binding of IL-6 to IL-6R. In the present example, these were obtained in selections where IL-6R was immobilized on MAb BN-12 (although other methods of obtaining such Nanobodies will be clear to the skilled person).
[1755] Subclass 2: Nanobodies against IL-6R that were capable of modulating (e.g. partially or fully reducing or preventing) binding of IL-6R to MAb BN-12. In the present example, these were obtained in alternative selection strategies where IL-6R was not immobilized on MAb BN-12 (although other methods of obtaining such Nanobodies will be clear to the skilled person).

[1756] A statistical overview of the screening effort is shown in Table C-4. Nanobodies showing the strongest inhibition were selected for further characterization.

### Example 8

### Sequence analysis 509 clones were subjected to sequence analysis (AGOWA, Middlesex, UK). Of these 509 clones 327 clones could inhibit the IL-6/IL-6R interaction and 182 were randomly picked clones. Based on the amino acid sequence homology (especially homology for CDR3) all clones were classified in 36 different families. Members of the same family are believed to have similar behavior in the different assays described in this patent application, though small differences in functional properties are possible. One or several representatives per family were chosen for further characterization. 14 families could inhibit the IL6/IL6R interaction.

### Example 9

### Characterization of the Nanobodies Obtained (Analyzed as Periplasmic Extract)

### Potency ELISA

[1757] In this ELISA, plasma was used as a source of native soluble IL-6R. By this assay, we aimed to confirm the alphascreen results and to get a view on the cross-reactivity of the clones towards cynomolgous IL-6R. Human plasma (ELISA 1 and ELISA 3) or cynomolgous plasma (ELISA 2) were pre-incubated with a dilution of the periplasmic extract of the clones together with human IL-6 (50 ng/mL). Subsequently, plasma soluble IL-6R was captured on a B-N12 coated plate and bound IL-6 was detected using anti-IL-6 antibody BAF206 and streptavidin-HRP (ELISA 1 and ELISA 2). The ELISA signal dropped when the Nanobody clone could compete with IL-6 for binding to soluble IL-6R. ELISA 3 was a parallel ELISA in which the detection antibody was replaced by anti-IL-6R antibody BAF227 to exclude false positive competitors, which actually compete with B-N12 (e.g. family 2). Depicted in Table C-5 is the ratio of the OD450 value of the test sample versus the blank OD450 (mock sample). Clones were ordered based on ELISA 1 data.

### Biacore

[1758] Periplasmic extracts of representative family clones were also analyzed on Biacore. Dissociation curves were used to calculate k_{off} rates. k_{off} rates are depicted in Table C-6.

### Example 10

### Nanobody Expression and Purification

[1759] Selected Nanobodies were expressed in E. coli as c-myc, His6-tagged proteins in a culture volume of 50 mL. Expression was induced by addition of 1 mM IPTG and allowed to continue for 4 h at 37° C. After spinning the cell cultures, periplasmic extracts were prepared by freeze-thawing the pellets. These extracts were used as starting material for immobilized metal affinity chromatography (IMAC). Nanobodies were eluted from the column with 150 mM imidazole and subsequently buffer-exchanged to PBS. Sequences of a panel of purified Nanobodies are depicted in Table A-3.

### Example 11

### Characterization of Monovalent Nanobodies

### Binding to Hybrid IL-6R

[1760] The panel of purified Nanobodies was tested by standard sandwich ELISA with coated human IL-6R versus hybrid IL-6R (see Example 3). Anti-myc-horseradish peroxidase (AbD Serotec, Oxford, UK) was used as a detection antibody. Results are shown in Table C-7. Only Nanobodies with k_{off} rates that were low enough to give a positive signal towards human IL-6R are depicted.

### Potency of Monovalent Wild Type Nanobodies in Cell-Based Assay (TF-1)

[1761] Nanobodies were also tested for their ability to inhibit IL-6-dependent proliferation of TF-1 cells (ECACC no.93022307; J. Cell Physiol. 1989, 140: 323; Exp. Cell Res. 1993, 208: 35) by blocking of IL-6 binding to IL-6R on the cell-surface.

[1762] The TF-1 cell (ECACC) line was maintained between 2−9×100,000 cells/mL using RPM 1640 supplemented with 2 mM Glutamine, 1% Sodium pyruvate, 3 ng/mL Human GM-CSF (eBiosciences, San Diego, Calif.) and 10% Foetal Bovine serum (Sigma, St. Louis, Mo.). Cells were subcultured 3 times a week and were maintained at 37% and a 5% CO₂ atmosphere. The same batch of GM-CSF (Lot E019991) and of Foetal Bovine Serum (lot no 098K3397) was used.

[1763] The cell-based assay was performed similarly as described in de Hon et al. (1994, J. Exp. Med. 180: 2395-2400). Cell suspensions were centrifuged for 10 min at 200 g and the supernatant was removed. Cells were resuspended in RPMI 1640 supplemented with 2 mM Glutamine, 1% Sodium pyruvate and 10% Foetal Bovine serum, were seeded at a density of 12500 cells/well in a 96-well plate and incubated for 72 h with different dilutions of the Nanobodies and a constant amount of 200 pg/mL IL-6. The 96-well plates were incubated in a humid chamber. Every sample was analysed in triplicate. The total volume/well was 200 μL. During the last 6 h of the incubation, cells were pulse-labeled with 0.2 μCi/well of ³H-thymidine (GE Healthcare, Uppsala, Sweden) in a total volume of 20

[1764] Cells were harvested with a semiautomatic cell harvester (Filtermate harvester, PerkinElmer) and the ³H-thymidine incorporation was measured using a Topcount NXT counter (PerkinElmer, Waltham, Mass.). Results are expressed as average counts per minute (cpm) per well, 1050 values are summarised in Table C-8.

### Potency of Monovalent Wild Type Nanobodies in Plasma Potency ELISA

[1765] A potency ELISA was done with the purified Nanobodies as described in Example 9. Here, different dilutions of each purified Nanobody were incubated with human (ELISA1) and cynomolgous plasma (ELISA2). IC50 values are depicted in Table C-9.

### Determination of Kd

[1766] From the purified panel of Nanobodies, 3 inhibitory Nanobodies were selected which were cross reactive with IL-6R from cynomolgus monkey and which had the lowest IC50 values in the plasma potency ELISA and cell-based assay (TF-1). Besides, 4 non-inhibitory Nanobodies were selected which were cross reactive with IL-6R from cynomolgus monkey, which could bind to the IL-6R domain II and/or III and which had a low k_{off} rate.

[1767] Affinity constants (Kd) of these 7 individual Nanobodies were determined by surface plasmon resonance on a Biacore 3000 instrument. In brief, IL-6R was amine-coupled to a CM5 sensor chip at a density of 800-1000 RU. Remaining reactive groups are inactivated. Nanobody binding was assessed at various concentrations ranging from 0.5 to 50 nM. Each sample was injected for 4 min at a flow rate of 45 μl/min to allow for binding to chip-bound antigen. Next, binding buffer without Nanobody was sent over the chip at the same flow rate to allow for dissociation of bound Nanobody. After 10 min, remaining bound analyte was removed by injecting regeneration solution (Glycine/HCl pH1.5). Binding curves obtained at different concentrations of Nanobody were used to calculate Kd values. In

[1768] Table C-10, an overview of k_{d}/k_{aff}, kₐ, and Kₐ values for the selected subset of 14 Nanobodies is shown.

[1769] Epitope mapping by FMAT

[1770] Eleven inhibitory Nanobodies were tested in competition with labelled Reference IgG for binding to

[1771] CHO cells expressing hIL-6R or cynoIL-6R. A range of concentrations of the Nanobodies and cold Reference IgG were incubated with Reference IgG-A647 and 5000 CHO cells expressing either human IL-6R (clone 4D6) or cyno IL-6R (clone 405) for 2 hours. Signals were measured in FMAT and the 1050 values determined. IC50 values are shown in Table C-11.

### Example 12

### Construction and Expression of Biparatopic Anti-IL-6R Nanobodies

[1772] Inhibitory Nanobodies and non-inhibitory Nanobodies were combined into biparatopic molecules (Table C-12). A 35GS linker (7×GGGGS) was chosen as a flexible linker between both building blocks. The inhibitory Nanobody was placed at the C-terminus. Sequences of the biparatopic constructs are depicted in Tables A-4, A-5 and A-6.

### Example 13

### Characterization of Biparatopic Anti-IL-6R Nanobodies

### Potency Assay

[1773] This assay was performed as described in Example 9. The effect of linking a non-inhibiting Nanobody to an inhibiting Nanobody PMP105E1 was assessed by comparing PMP105E1 itself with one biparatopic construct IL6R0402. Titration curves are depicted in FIG. 4a and b.

[1774] Cell-Based Assay (TF-1 Assay)

[1775] This assay was performed as described in Example 11. The effect of linking a non-inhibiting Nanobody to an inhibiting Nanobody PMP105E1 was assessed by comparing PMP105E1 itself with two biparatopic constructs described in Example 12. Titration curves are depicted in FIG. 5.

TABLE A-1
Preferred combinations of CDR sequences

| | SEQ | | SEQ | | SEQ | | SEQ | |
|---|---|---|---|---|---|---|---|---|
| Nanobody | ID | FR1 | ID | CDR 1 | ID | FR2 | ID | CDR 2 |
| IL6RPMP100A10 | 132 | EVQLVESGGGLVQAG | 218 | PYTMG | 302 | WFRQAPG | 387 | GISWSTGIA |
| | | GSLRLSCAASGRGFS | | | | KERVFVA | | HYTDSVKG |
| IL6RPMP100A6 | 133 | EVQLVESGGGLVQAG | 219 | DDAMG | 303 | WFRQAPG | 388 | GIDWRGNIV |
| | | DSLRLSCLASGRSFK | | | | KEREFVS | | DAESVKG |
| IL6RPMP100D11 | 134 | EVQLVESGGGLVQAG | 220 | DDAMG | 304 | WFRQAPG | 389 | GIDWRGNIV |
| | | DSLRLSCLASGRSFK | | | | KEREFVS | | DAESVKG |
| IL6RPMP100G11 | 135 | EVQLVESGGGLVQAG | 221 | PYTMG | 305 | WFRQAPG | 390 | GISWSTGIA |
| | | GSLRLSCAASGRGFS | | | | KERVFVA | | HYTDSVKG |
| IL6RPMP101A1 | 136 | EVQLVESGGGTVQAG | 222 | NYAMG | 306 | WFRQAPG | 391 | AIAYATHFA |
| | | GSLKLSCAASGRTFT | | | | KEREFVA | | DSVKG |
| IL6RPMP101A3 | 137 | EVQLVESGGGLVQAG | 223 | DYDMG | 307 | WFRQAPG | 392 | IIDTNGDNT |
| | | GPLRLSCTASGRTFT | | | | KEREVVA | | LTVGSVKG |
| IL6RPMP101A4 | 138 | EVQLVESGGGTVQAG | 224 | NYAMG | 308 | WFRQAPG | 393 | AIAYATHFA |
| | | GSLKLSCAASGRTFT | | | | KEREFVA | | DSVKG |
| IL6RPMP101A5 | 139 | EVQLVESGGGLVQAG | 225 | DYDMG | 309 | WFRQAPG | 394 | IIDTNGDNT |
| | | GSLRLSCTASGRTFS | | | | KERECVA | | LIVGSVKG |
| IL6RPMP101B12 | 140 | EVQLVESGGGLVQPG | 226 | YYAIG | 310 | WFRQAPG | 395 | SISSNDGST |
| | | GSLRLSCAASGVTLD | | | | KEREGVS | | FYADSVKG |
| IL6RPMP101B2 | 141 | EVQLVESGGGLVQAG | 227 | DYDMG | 311 | WFRQAPG | 396 | IIDTNGDNT |
| | | GSLRLSCTASGRTFT | | | | KEREVVA | | LTVGSVKG |
| IL6RPMP101B3 | 142 | EVQLVESGGGLVQAG | 228 | INAMG | 312 | WYRQAPG | 397 | AAISGGSTN |
| | | GSLRLSCAASGSIFR | | | | KQRELVA | | YADFVKG |
| IL6RPMP101B6 | 143 | EVQLVESGGGLVQAG | 229 | IKAMG | 313 | WYRQAPG | 398 | RITSGGSTV |
| | | GSLRLSCAASGSDFS | | | | KQRELVA | | YADSVKG |
| IL6RPMP101C2 | 144 | EVQLVESGGGLVQAG | 230 | DYDMG | 314 | WFRQAPG | 399 | IIDTNGDNT |
| | | GSLRLSCTASGRTFS | | | | KERECVA | | LIVGSVKG |
| IL6RPMP101C3 | 145 | EVQLVESGGGLVRAG | 231 | YYAIG | 315 | WFRQAPG | 400 | SISSSNGNT |
| | | GSLRLSCAASGFAFD | | | | KEREGVS | | YYADSVRG |
| IL6RPMP101D1 | 146 | EVQLVESGGGLVQAG | 232 | DYDMG | 316 | WFRQAPG | 401 | IIDTNGDNT |
| | | GSLRLSCTASGRTFS | | | | KERECVA | | LIVGSVKG |
| IL6RPMP101D2 | 147 | EVQMVESGGGLVQAG | 233 | DYAIG | 317 | WFRQAPG | 402 | SISSSNGNT |
| | | GSLRLSCAASGFAFD | | | | KEREGVS | | YYADSVRG |
| IL6RPMP101D6 | 148 | EVQLVESGGGLVQAG | 234 | DYDMG | 318 | WFRQAPG | 403 | IIDTNGDNT |
| | | GSLRLSCTASGRTFS | | | | KERECVA | | LIVGSVKG |
| IL6RPMP101E1 | 149 | EVQLVESGGGLVQAG | 235 | DYAIG | 319 | WFRQAPG | 404 | SISSSNGNT |
| | | GSLRLSCAASGFAFD | | | | KEREGVS | | YYADSVRG |
| IL6RPMP101F1 | 150 | EVQLVESGGGLVQAG | 236 | DYAIG | 320 | WFRQAPG | 405 | SISSSNGNT |
| | | GSLRLSCAASGFAFD | | | | KEREGVS | | YYADSVRG |
| IL6RPMP101F2 | 151 | EVQLVESGGGLVQAG | 237 | DYAIG | 321 | WFRQAPG | 406 | SISSSNGNT |
| | | GSLRLSCAASGFAFD | | | | KEREGVS | | YYADSVRG |
| IL6RPMP101F3 | 152 | EVQLVESGGGLVQAG | 238 | DYAIG | 322 | WFRQAPG | 407 | SISSSNGNT |
| | | GSLRLSCAASGFAFD | | | | KEREGVS | | YYADSVRG |
| IL6RPMP101F6 | 153 | EVQLVESGGGLVQAG | 239 | IKAMG | 323 | WYRQAPG | 408 | RITSGGSTY |
| | | GSLRLSCAASGSIFS | | | | KQRELVA | | YADSVKG |
| IL6RPMP101G1 | 154 | EVQLVESGGGLVQPG | 240 | YYAIG | 324 | WFRQAPG | 409 | CISSSDGST |
| | | GSLRLSCAASGGTLD | | | | KEREGVS | | YYASSVKG |
| IL6RPMP101G11 | 155 | EVQLVESGGGLVQPG | 241 | LDYYA | 325 | WFRQAPG | 410 | CISSTDGST |
| | | GSLRLSCAASASGFT | | IG | | KEREGVS | | YYADSVKG |
| IL6RPMP101G2 | 156 | EVQLVESGGGLVQAG | 242 | INAMG | 326 | WYRQAPG | 411 | AAISGGSTN |
| | | GSLRLSCAASGSIFR | | | | KQRELVA | | YADFVKG |
| IL6RPMP101G3 | 157 | EVQLVESGGGLVQAG | 243 | DYDMG | 327 | WFRQAPG | 412 | IIDTNGDNT |
| | | GSLRLSCTASGRTFS | | | | KERECVA | | LIVGSVKG |
| IL6RPMP101G4 | 158 | EVQLVESGGGLVQAG | 244 | DYAIG | 328 | WFRQAPG | 413 | SISSSNGNT |
| | | GSLRLSCAASGFAFD | | | | KEREGVS | | YYADSVRG |
| IL6RPMP101H3 | 159 | EVQLVESGGGLVQAG | 245 | DYAIG | 329 | WFRQAPG | 414 | SISSSNGNT |
| | | GSLRLSCAASGFAFD | | | | KEREGVS | | YYADSVRG |
| IL6RPMP101H6 | 160 | EVQLVESGGGLVQAG | 246 | DYDMG | 330 | WFRQAPG | 415 | IIDTNGDNT |
| | | GSLRLSCTASGRTFT | | | | KEREVVA | | LTVGSVKG |
| IL6RPMP102G3 | 161 | EVQLVESGGGLVQAG | 247 | INAMG | 331 | WYRQAPG | 416 | VITDGDKTL |
| | | GSLRLSCAASGSIDR | | | | KQRDFLA | | YADSVKG |
| IL6RPMP103A2 | 162 | EVQLVESGGGLVQPG | 248 | INTMG | 332 | WYRQVPG | 417 | TVRSGSITN |
| | | GSLRLSCAASGSIFS | | | | KQRELVA | | YADSVQD |
| IL6RPMP103A4 | 163 | EVQLVESGGGLVQPG | 249 | INTMG | 333 | WYRQVPG | 418 | TVRSGSITN |
| | | GSLRLSCAASGSIFS | | | | KQRELVA | | YADSVQD |
| IL6RPMP103A5 | 164 | EVQLVESGGGLVQAG | 250 | TLHMG | 334 | WFRQAPG | 419 | AISSDGGSE |
| | | DSLRLSCVASGLPFS | | | | KEHESVS | | YYAGSVKG |
| IL6RPMP103B2 | 165 | EVQLVESGGGLVQPG | 251 | INMMA | 335 | WYCQAPG | 420 | SISSGGGIN |
| | | GSLRLSCAASGSTFS | | | | KQRELVA | | YADSVKG |
| IL6RPMP103C3 | 166 | EVQLVESGGGLVQPG | 252 | ISTMG | 336 | WYRQAPG | 421 | GVGLDGTPN |
| | | GSMRLSCAATGAIFS | | | | AQREFVA | | YADSVKG |
| IL6RPMP103C4 | 167 | EVQLVESGGGLVEAG | 252 | SYSMA | 337 | WFRQAPG | 422 | IIRGNPSRT |
| | | GSLRLSCAAAGRTLS | | | | KEREFVA | | YHSDSVKG |
| IL6RPMP103C7 | 168 | EVQLVESGGGLVQAG | 253 | DDTMA | 338 | WFRQAPG | 423 | TITFSGART |
| | | GSLSLSCATSGRTIS | | | | KEREFVA | | HYSDSVRD |
| IL6RPMP103D7 | 169 | EVQLVESGGGLVEAG | 254 | SYSMA | 339 | WFRQAPG | 424 | IIRGNPSRT |
| | | GSLRLSCAAAGRTLS | | | | KEREFVA | | YHSDSVKG |
| IL6RPMP103F2 | 170 | EVQLVESGGGLVQAG | 255 | TYIMA | 340 | WFRQAPG | 425 | SILWDGSIT |
| | | GSLRLSCVASGHTSD | | | | KEREFVA | | YYADSVKD |
| IL6RPMP103H9 | 171 | EVQLVESGGGLVQPG | 256 | INAMY | 341 | WHRQAPG | 426 | SITSGGMRN |
| | | GSLRLSCAASKSIFD | | | | KQRESVA | | YADSVKD |
| IL6RPMP104A8 | 172 | EVQLVESGGGLVQAG | 257 | DYDMG | 342 | WFRQAPG | 427 | VIDTNGGHT |
| | | GSLRLSCTASGRTFS | | | | KEREFVA | | LTVGSVKG |
| IL6RPMP104B8 | 173 | EVQLVESGGGLVQAG | 258 | DYAIG | 343 | WFRQAPG | 428 | SISSSNGNT |
| | | GSLRLSCAASGFAFD | | | | KEREGVS | | YYADSVRG |
| IL6RPMP104B9 | 174 | EVQLVESGGGLVQAG | 259 | DYDMG | 344 | WFRQAPG | 429 | IIDTNGDNT |
| | | GSLRLSCTASGRTFS | | | | KERECVA | | LIVGSVKG |
| IL6RPMP104E4 | 175 | EVQLVESGGGTVQAG | 260 | NYAMG | 345 | WFRQAPG | 430 | AIAYATHFA |
| | | GSLKLSCAASGRTFT | | | | KEREFVA | | DSVKG |
| IL6RPMP104E7 | 176 | EVQLVESGGGLVQAG | 261 | INAMG | 346 | WYRQAPG | 431 | SITSGGSTT |
| | | GSLRLSCAAGGSIFS | | | | KQRELVA | | YADSVKG |
| IL6RPMP105B8 | 177 | EVQLVESGGGLVRAG | 262 | DYAIG | 347 | WFRQAPG | 432 | SISSSNGNT |
| | | GSLRLSCAASGFAFD | | | | KEREGVS | | YYADSVRG |
| IL6RPMP105C2 | 178 | EVQLVESGGGLVQAG | 263 | INAMG | 348 | WYRQAPG | 433 | AAISGGSTN |
| | | GSLRLSCAASGSIFR | | | | EQRELVA | | YADFVKG |
| IL6RPMP105D3 | 179 | EVQLEESGGGLVQAG | 264 | INAMG | 349 | WYRQAPG | 434 | AAISGGSTN |
| | | GSLRLSCAASGSIFR | | | | KQRELVA | | YADFVKG |
| IL6RPMP105E1 | 180 | EVQLVESGGGLVQAG | 265 | IKAMG | 350 | WYRQAPG | 435 | RITSGGSTY |
| | | GSLRLSCAASGSIFS | | | | KQRELVA | | YADSVKG |
| IL6RPMP105E11 | 181 | EVQLVESGGGLVQAG | 266 | DYAIG | 351 | WFRQAPG | 436 | SISSSNGNT |
| | | GSLRLSCAASGFAFD | | | | KEREGVS | | YYADSVRG |
| IL6RPMP105H10 | 182 | EVQMVESGGGLVQAG | 267 | DYAIG | 352 | WFRQAPG | 437 | SISSSNGNT |
| | | GSLRLSCAASGFAFD | | | | KEREGVS | | YYADSVRG |
| IL6RPMP106B2 | 183 | EVQLVESGGGLVQAG | 268 | INAMG | 353 | WYRQAPG | 438 | AAISGGSTN |
| | | GSLRLSCAASGSIFR | | | | KQRELVA | | YADFVKG |
| IL6RPMP106D6 | 184 | EVQLVESGGGLVQAG | 269 | DYAIG | 354 | WFRQAPG | 439 | CMISSDGST |
| | | GSLRLSCAASGFTFD | | | | KEREGVS | | YYADSVKG |
| IL6RPMP106F4 | 185 | EVQLVESGGGLVQAG | 270 | INAMG | 355 | WYRQAPG | 440 | AAISGGSTN |
| | | GSLRLSCAASGSIFR | | | | KQRELVA | | YADFVKG |
| IL6RPMP106F7 | 186 | EVQLVESEGGLVQAG | 271 | INAMG | 356 | WYRQAPG | 441 | AAISGGSTN |
| | | GSLRLSCAASGSIFR | | | | KQRELVA | | YADFVKG |
| IL6RPMP107A1 | 187 | EVQLVESGGGLVQAG | 272 | INAMG | 357 | WYRQAPG | 442 | VITDTDSTI |
| | | GSLNLSCNASGDIGS | | | | QQREWVA | | YPDSVKG |
| IL6RPMP107A9 | 188 | EVQLVESGGGLVQAG | 273 | DMFMG | 358 | WFRQAPG | 443 | RISPSGNTF |
| | | GSLRLSCAASGGIFS | | | | KSRESVA | | YQDSVRG |
| IL6RPMP107B4 | 189 | EVQLVESGGGLVQAG | 274 | MHRMG | 359 | WFRQAPG | 444 | RIFTDDGDS |
| | | GSLRLSCVASGLRLN | | | | KEREFVA | | YYADSVQG |
| IL6RPMP107C3 | 190 | EVQLVESGGGLVQAG | 275 | INAMG | 360 | WHRQAPG | 445 | VITDTDSTI |
| | | GSLNLSCNASGDIGS | | | | QQREWVA | | YPDSVKG |
| IL6RPMP107E4 | 191 | EVQLVESGGGLVQAG | 276 | INAMG | 361 | WYRQAPG | 446 | VITDGDKTL |
| | | GSLRLSCAASGSIDR | | | | KQRDFLA | | YADSVKG |
| IL6RPMP107G10 | 192 | EVQLVESGGGLVQAG | 277 | INAMG | 362 | WYRQAPG | 447 | IITDGSKTL |
| | | GSLRLSCAASGSIEN | | | | KQRDFLA | | YADSVKG |
| IL6RPMP107H2 | 193 | KVQLVESGGGLVQPG | 278 | SYAMS | 363 | WVRRAPG | 448 | AINSDGTGS |
| | | GSLRLSCAASGFTFS | | | | KGLEWVS | | SYAPFVTG |
| IL6RPMP107H5 | 194 | EVPLVESGGGLVQAG | 279 | INAMG | 364 | WYRQAPG | 449 | VITDTDSTI |
| | | GSLNLSCNASGDIGS | | | | QQREWVA | | YPDSVKG |
| IL6RPMP108C10 | 195 | EVQLVESGGGLVQAG | 280 | DYDMG | 365 | WFRQAPG | 450 | VIDTNGDNT |
| | | GSLRLSCTASGRTFS | | | | KERECVA | | LTVGSVKG |
| IL6RPMP108C9 | 196 | EVQLVESGGGLVQAG | 281 | MA | 366 | WFRQAPG | 451 | AISIVTDYA |
| | | GSLRLSCAASGRTYA | | | | KEREFVA | | DSVKG |
| IL6RPMP108D1 | 197 | EVQLVESGGGLVQAG | 282 | DYDMG | 367 | WFRQAPG | 452 | VIDTNGDNT |
| | | GSLRLSCTASGRTFS | | | | KERECVA | | LTVGSVKG |
| IL6RPMP108D10 | 198 | EVQLVESGGGSVQAG | 283 | DYDMG | 368 | WFRQAPG | 453 | VIDTNGDNT |
| | | GSLRLSCTASGRTFS | | | | KERECVA | | LTVGSVKG |
| IL6RPMP108D2 | 199 | EVQLVESGGGLVQAG | 284 | DYDIG | 369 | WFRQAPG | 454 | GISSSDGNT |
| | | GSLRLSCAASGFTFD | | | | KEREGVS | | YYADSVKG |
| IL6RPMP108E1 | 200 | EVQLVESGGGLVQAG | 285 | DYDIG | 370 | WFRQAPG | 455 | GISSSDGNT |
| | | GSLRLSCAASGFTFD | | | | KEREGVS | | YYADSVKG |
| IL6RPMP108E9 | 201 | EVQLVESGGGLVQAG | 286 | NFPMG | 371 | WFRQRPG | 456 | VISWNNNYI |
| | | GSLRLSCAFSRRSFG | | | | EEREYVA | | HYRDSVKG |
| IL6RPMP108F7 | 202 | EVQLVESGGGLVQAG | 287 | DYDMG | 372 | WFRQAPG | 457 | VIDTNGDNT |
| | | GSLRLSCTASGRTFS | | | | KERECVA | | LTVGSVKG |
| IL6RPMP119A10 | 203 | EVQLVESGGGLVQPG | 288 | INAMY | 373 | WHRQAPG | 458 | SITSGGMRN |
| | | GSLRLSCAASKSIFD | | | | KQRESVA | | YADSVKD |
| IL6RPMP120A1 | 204 | EVQLVESGGGLVQAG | 289 | DDTMA | 374 | WFRQAPG | 459 | TITFSGART |
| | | GSLSLSCATSGRTIS | | | | KEREFVA | | HYSDSVRD |
| IL6RPMP120A5 | 205 | EVQLVESGGGLVQAG | 290 | DDTMA | 375 | WFRQAPG | 460 | IITFNGART |
| | | GSLSLSCATSGRTIS | | | | KEREFVA | | HYSDSVRD |
| IL6RPMP120B2 | 206 | EVQLVESGGGLVQAG | 291 | DDTMA | 376 | WFRQAPG | 461 | TITFSGART |
| | | GSLSLSCATSGRTIS | | | | KEREFVA | | HYSDSVRD |
| IL6RPMP120B7 | 207 | EVQLVESGGGLVQAG | 292 | DDTMA | 377 | WFRQAPG | 462 | TITFSGART |
| | | GSLSLSCATSGRTIS | | | | KEREFVA | | HYSDSVRD |
| IL6RPMP120C1 | 208 | EVQLVESGGGLVQAG | 293 | DDTMA | 378 | WFRQAPG | 463 | TITFSGART |
| | | GSLSLSCATSGRTIS | | | | KEREFVA | | HYSDSVRD |
| IL6RPMP120C10 | 209 | EVQLVESGGGLVQAG | 294 | DDTMA | 379 | WFRQAPG | 464 | IITFNGART |
| | | GSLSLSCATSGRTIS | | | | KEREFVA | | HYSDSVRD |
| IL6RPMP120C11 | 210 | EVQLVESGGGLVQAG | 295 | DDTMA | 380 | WFRQAPG | 465 | TITFSGART |
| | | GSLSLSCATSGRTIS | | | | KEREFVA | | HYSDSVRD |
| IL6RPMP120C5 | 211 | EVQLVESGGRSVQAG | 296 | DYAMG | 381 | WFRQAPG | 466 | VISWSGAYT |
| | | GSLRLSCAASGRTFR | | | | KEREFVA | | EYADSVKG |
| IL6RPMP120D2 | 212 | EVQLVESGGGLVQAG | 297 | DDTMA | 382 | WFRQAPG | 467 | TITFSGART |
| | | GSLSLSCATSGRTIS | | | | KEREFVA | | HYSDSVRD |
| IL6RPMP120F4 | 213 | EVQLVESGGGLVQTG | 298 | TASVG | 383 | WFRQAPG | 468 | GISSGGSTH |
| | | GSLRLSCAVSGRTDS | | | | KQREWVV | | YADSVKG |
| IL6RPMP120G11 | 214 | EVQLVESGGGLVQAG | 299 | GNAMG | 384 | WFRQAPG | 469 | AITWSGDMS |
| | | GSVRLSCTASGGTLS | | | | TEREFVA | | VYAEFVKG |
| IL6RPMP120G6 | 215 | EVQLVESGGDLVQTG | 300 | DRAMG | 385 | WYRQAPG | 470 | GVSRGGMTS |
| | | GSLRLSCAASGITVS | | | | KQREMVA | | YADSVKG |
| IL6RPMP120H6 | 216 | EVQLVESGGGLVQPG | 301 | DNAMG | 386 | WYRQYPG | 471 | GISRGGTTG |
| | | GSLRLSCVVSGIIFS | | | | KQREWVA | | YTDSVKG |

| | SEQ | | SEQ | | | | SEQ |
|---|---|---|---|---|---|---|---|
| Nanobody | ID | FR3 | ID | CDR 3 | SEQ ID | FR4 | ID |
| IL6RPMP100A10 | 472 | RFTISRDNAKNTGSLQ | 557 | VQTTKGNY | 642 | WGQGTQ | 727 |
| | | MNSLKPEDTAVYYCAV | | DY | | VTVSS | |
| IL6RPMP100A6 | 473 | RFTISRENAKNTLYLQ | 558 | SSVFSDLR | 643 | WGQGTQ | 728 |
| | | MNHLKPEDTAVYYCAA | | YRKNPKY | | VTVSS | |
| IL6RPMP100D11 | 474 | RFTISRENAKNTLYLQ | 559 | SSVFSDLR | 644 | WGQGTQ | 729 |
| | | MNHLKPEDTAVYYCAA | | YRKNPKY | | VTVSS | |
| IL6RPMP100G11 | 475 | RFTISRDNAKNTGSLQ | 560 | VQTTRGNY | 645 | WGQGTQ | 730 |
| | | MNSLKPEDTAVYYCAV | | DY | | VTVSS | |
| IL6RPMP101A1 | 476 | RFTISRGNAKNTVYLQ | 561 | DLSLSKMV | 646 | WGKGTL | 731 |
| | | MNSLKPEDTAVYYCAA | | SKITSDMDY | | VTVSS | |
| IL6RPMP101A3 | 477 | RFAISSDNAKNTVYLQ | 562 | GAWSALRR | 647 | WGQGTQ | 732 |
| | | MNSLLPEDTAVYTCAA | | SVANY | | VTVSS | |
| IL6RPMP101A4 | 478 | RFTISRGNAKNTVYLQ | 563 | DLSLSKMV | 648 | WGKGTL | 733 |
| | | MNSLKPEDAAVYYCAA | | SKITSDMDY | | VTVSS | |
| IL6RPMP101A5 | 479 | RFAISSDNAKNTVYLQ | 564 | GVWSSLRH | 649 | WGQGTQ | 734 |
| | | MNSLLPEDTAVYTCAA | | TAANY | | VTVSS | |
| IL6RPMP101B12 | 480 | RFTISRDKAKNTVYLQ | 565 | TYLTAQAV | 650 | WGQGTQ | 735 |
| | | MNSLKPEDTAVYYCAA | | GVPVAYYE | | VTVSS | |
| | | | | FDY | | | |
| IL6RPMP101B2 | 481 | RFAISSDNAKNTVYLQ | 566 | GAWSALRR | 651 | WGQGTQ | 736 |
| | | MNSLLPEDTAVYTCAA | | SVANY | | VTVSS | |
| IL6RPMP101B3 | 482 | RFTISRDNAKNTVYLQ | 567 | LVVSHNYS | 652 | WGQGTQ | 737 |
| | | MNSLKPEDTAVYYCNA | | DYVPFPDDY | | VTVSS | |
| IL6RPMP101B6 | 483 | RFTISRDNAKNTVYLQ | 568 | IVTYSDYD | 653 | WGQGTQ | 738 |
| | | MNSLKPEDATVYYCNA | | LGNDY | | VTVSS | |
| IL6RPMP101C2 | 484 | RFAISSDNAKNTVYLQ | 569 | GVWSSLRH | 654 | WGQGTQ | 739 |
| | | MNSLLPEDTAVYTCAA | | TAANY | | VTVSS | |
| IL6RPMP101C3 | 485 | RFTISSDNAKNTVYLQ | 570 | IWGIFFNE | 655 | WGQGTQ | 740 |
| | | MNSLKPEDTGVYYCAA | | KMPVGAYDY | | VTVSS | |
| IL6RPMP101D1 | 486 | RFAISSDNAKNTVYLQ | 571 | GVWSSLRH | 656 | WGQGTQ | 741 |
| | | MNSLLPEDTAVYTCAA | | TAANY | | VTVSS | |
| IL6RPMP101D2 | 487 | RFTISSDNAKNTVYLQ | 572 | IWGIFFNE | 657 | WGQGTQ | 742 |
| | | MNSLKPEDAGVYYCAA | | KMPVGAYDY | | VTVSS | |
| IL6RPMP101D6 | 488 | RFAISSDNAKNTVYLQ | 573 | GVWSSLRH | 658 | WGQGTQ | 743 |
| | | MNSLLPEDTAVYTCAA | | TAANY | | VTVSS | |
| IL6RPMP101E1 | 489 | RFTISSDNAKNTVYLQ | 574 | IWGIFFNE | 659 | WGQGTQ | 744 |
| | | MNSLKPEDTGVYYCAA | | KMPVGAYDY | | VTVSS | |
| IL6RPMP101F1 | 490 | RFTISSDNAKNTVYLQ | 575 | IWGIFFNE | 660 | WGQGTQ | 745 |
| | | MNSLKPEDTGVYYCAA | | KMPVGAYDY | | VTVSS | |
| IL6RPMP101F2 | 491 | RFTISSDNAKNTVYLQ | 576 | IWGIFFNE | 661 | WGQGTQ | 746 |
| | | MNSLKPEDTGVYYCAA | | KMPVGAYDY | | VTVSS | |
| IL6RPMP101F3 | 492 | RFTISSDNAKNTVYLQ | 577 | IWGIFFNE | 662 | WGQGTQ | 747 |
| | | MNSLKPEDTGVYYCAA | | KMPVGAYDY | | VTVSS | |
| IL6RPMP101F6 | 493 | RFTISRDNAKNTVYLQ | 578 | IVTDSDYD | 663 | WGQGTQ | 748 |
| | | MNSLKPEDTAVFYCNA | | LGNDY | | VTVSS | |
| IL6RPMP101G1 | 494 | RFTVSRDKAKNTVYLQ | 579 | VFTTAQAM | 664 | WGQGTQ | 749 |
| | | MNSLKPEDTAVYYCAF | | GVPNNPYE | | VTVSS | |
| | | | | YDF | | | |
| IL6RPMP101G11 | 495 | RFTISRDNAKNTVYLQ | 580 | VLTTAQAM | 665 | WGQGTQ | 750 |
| | | MNSLNPEDTGVYTCAA | | GVPTRSYE | | VTVSS | |
| | | | | YDY | | | |
| IL6RPMP101G2 | 496 | RFTISRDNAKNTVYLQ | 581 | LVVSHNYS | 666 | WGQGTQ | 751 |
| | | MNSLKPEDTAVYYCNA | | DYVPFPDDY | | VTVSS | |
| IL6RPMP101G3 | 497 | RFAISSDNAKNTVYLQ | 582 | GVWSSLRH | 667 | WGQGTQ | 752 |
| | | MNSLLPEDTAVYTCAA | | TAANY | | VTVSS | |
| IL6RPMP101G4 | 498 | RFTISSDNAKNTVYLQ | 583 | IWGIFFNE | 668 | WGQGTQ | 753 |
| | | MNSLKPEDTGVYYCAA | | KMPVGAYDY | | VTVSS | |
| IL6RPMP101H3 | 499 | RFTISSDNAKNTVYLQ | 584 | IWGIFFNE | 669 | WGQGTQ | 754 |
| | | MNSLKPEDTGVYYCAA | | KMPVGAYDY | | VTVSS | |
| IL6RPMP101H6 | 500 | RFAISSDNAKNTVYLQ | 585 | GAWSALRR | 670 | WGQGTQ | 755 |
| | | MNSLLPEDTAVYTCAA | | SVANY | | VTVSS | |
| IL6RPMP102G3 | 501 | RFTISNDNAKNTVYLQ | 586 | YQAGWGDY | 671 | WGQGTQ | 756 |
| | | MNSLKPEDTAVYYCNA | | | | VTVSS | |
| IL6RPMP103A2 | 502 | QFTITRDIDENTVYLQ | 587 | RASVPGRG | 672 | WGQGTQ | 757 |
| | | MNSLKPEDTAVYYCLT | | YQDY | | VTVSS | |
| IL6RPMP103A4 | 503 | RFTITRDIDENTVYLQ | 588 | RASVPGRG | 673 | WGQGTQ | 758 |
| | | MNSLKPEDTAVYYCLT | | YQDY | | VTVSS | |
| IL6RPMP103A5 | 504 | RFTISRDNAKNTVYLQ | 589 | DPRRIGAN | 674 | WGQGTQ | 759 |
| | | MNSLKPEDTAVYYCAA | | IKYSDY | | VTVSS | |
| IL6RPMP103B2 | 505 | RFTISRDYAENSVDLQ | 590 | RGTYLNGD | 675 | WGQGTQ | 760 |
| | | MNSLKPEDTAVYYCNA | | HYSTNYNS | | VTVSS | |
| IL6RPMP103C3 | 506 | RFTISRDNTKNTVSLQ | 591 | DEGMDYDG | 676 | WGQGTQ | 761 |
| | | MENLKPEDTGVYYCNI | | NFYDR | | VTVSS | |
| IL6RPMP103C4 | 507 | RFTASRDNAKNVYLQ | 592 | DPPPFASD | 677 | WGQGTQ | 762 |
| | | MNRLEPEDTAVYYCAA | | YSAPQSYDY | | VTVSS | |
| IL6RPMP103C7 | 508 | RFTISRDNAKNTVYLQ | 593 | STKYYSST | 678 | WGQGTQ | 763 |
| | | MDSLKSEDTAVYYCAA | | YNYIHPAF | | VTVSS | |
| | | | | YDI | | | |
| IL6RPMP103D7 | 509 | RFTASRDNAKNTVYLQ | 594 | DPPPFASD | 679 | WGQGTO | 764 |
| | | MNRLEPEDTAVYYCAA | | YSAPQSYDY | | VTVSS | |
| IL6RPMP103F2 | 510 | RFTISRDISRKTLYLQ | 595 | GIYFSRRY | 680 | WGQGTQ | 765 |
| | | MNSLRPEDTATYTCAR | | VDPGIYGT | | VTVSS | |
| IL6RPMP103H9 | 511 | RFTISKDNAKNTVYLQ | 596 | GRYEGGVW | 681 | WGQGTQ | 766 |
| | | MNGLKPDDTAVYYCGL | | RDY | | VTVSS | |
| IL6RPMP104A8 | 512 | RFAISSDNAKNTVYLQ | 597 | GAWSSLRK | 682 | WGQGTQ | 767 |
| | | MNSLVPEDTAVYTCAA | | TAASY | | VTVSS | |
| IL6RPMP104B8 | 513 | RFTISSDNAKNTVYLQ | 598 | IWGIFFNE | 683 | WGQGTQ | 768 |
| | | MNSLKPEDTGVYYCAA | | KMPVGAYDY | | VTVSS | |
| IL6RPMP104B9 | 514 | RFAISSDNAKNTVYLQ | 599 | GVWSSLRH | 684 | WGQGTQ | 769 |
| | | MNSLLPEDTAVYTCAA | | TAANY | | VTVSS | |
| IL6RPMP104E4 | 515 | RFTISRGNAKNTVYLQ | 600 | DLSLSKMV | 685 | WGKGTL | 770 |
| | | MNSLKPEDTAVYYCAA | | SKITSDMDY | | VTVSS | |
| IL6RPMP104E7 | 516 | RFTISRDNAKDTVYLQ | 601 | HIRFPFPN | 686 | WGQGTQ | 771 |
| | | MNSLKPEDTAVYYCNA | | DY | | VTVSS | |
| IL6RPMP105B8 | 517 | RFTISSDNAKNTVYLQ | 602 | IWGIFFNE | 687 | WGQGTQ | 772 |
| | | MNSLKPEDTGVYYCAA | | KMPVGAYDY | | VTVSS | |
| IL6RPMP105C2 | 518 | RFTISRDNAKNTVYLQ | 603 | LVVSENYS | 688 | WGQGTQ | 773 |
| | | MNSLKPEDTAVYYCNA | | DYVPFPDDY | | VTVSS | |
| IL6RPMP105D3 | 519 | RFTISRDNAKNTVYLQ | 604 | LVVSHNYS | 689 | WGQGTQ | 774 |
| | | MNSLKPEDTAVYYCNA | | DYVPFPDDY | | VTVSS | |
| IL6RPMP105E1 | 520 | RFTISRDNAKNTVYLQ | 605 | IVTDSDYD | 690 | WGQGTQ | 775 |
| | | MNSLKPEDTAVFYCNA | | LGNDY | | VTVSS | |
| IL6RPMP105E11 | 521 | RFTISSDNAKNTVYLQ | 606 | IWGIFFNE | 691 | WGQGTQ | 776 |
| | | MNGLKPEDTGVYYCAA | | KMPVGAYDY | | VTVSS | |
| IL6RPMP105H10 | 522 | RFTISSDNAKNTVYLQ | 607 | IWGIFFNE | 692 | WGQGTQ | 777 |
| | | MNSLKPEDAGVYYCAA | | KMPVGAYDY | | VTVSS | |
| IL6RPMP106B2 | 523 | RFTISRDNAKNTVYLQ | 608 | LVVSHNYS | 693 | WGQGTQ | 778 |
| | | MNSLKPEDTAVYYCNA | | DYVPFPDDY | | VTVSS | |
| IL6RPMP106D6 | 524 | RFTISSDNAKNTVYLQ | 609 | DLSLYGCY | 694 | WGQGTQ | 779 |
| | | MDSLKPEDTAVYYCAA | | VGDRDLYD | | VTVSS | |
| | | | | YDY | | | |
| IL6RPMP106F4 | 525 | RFTISRDNAKNTVYLQ | 610 | LVVSHNYS | 695 | WGQGTQ | 780 |
| | | MNSLKPGDTAVYYCNA | | DYVPFPDDY | | VTVSS | |
| IL6RPMP106F7 | 526 | RFTISRDNAKNTVYLQ | 611 | LVVSHNYS | 696 | WGQGTQ | 781 |
| | | MNSLKPEDTAVYYCNA | | DYVPFPDDY | | VTVSS | |
| IL6RPMP107A1 | 527 | RFAISRDGAKNTVHLR | 612 | YQAGWGDY | 697 | WGQGTQ | 782 |
| | | MSSLKPEDTAVYYCNA | | | | VTVSS | |
| IL6RPMP107A9 | 528 | RFTISTDNAKNTVYLQ | 613 | NVGVTGSY | 698 | WGQGTQ | 783 |
| | | MNNLKPEDTAVYYCAA | | EY | | VTVSS | |
| IL6RPMP107B4 | 529 | RFTISGDNAKNTVYLQ | 614 | GYMSGAES | 699 | WGQGTQ | 784 |
| | | MNSLKPEDTGVYFCAA | | PIGYDN | | VTVSS | |
| IL6RPMP107C3 | 530 | RFAISRDGAKNTVHLR | 615 | YQAGWGDY | 700 | WGQGTQ | 785 |
| | | MSSLKPEDTAVYYCNA | | | | VTVSS | |
| IL6RPMP107E4 | 531 | RFTISNDNAKNTVYLQ | 616 | YQAGWGDY | 701 | WGQGTQ | 786 |
| | | MNSLKPEDTAVYYCNA | | | | VTVSS | |
| IL6RPMP107G10 | 532 | RFTISNDNAKNTVYLQ | 617 | YQAGWGDY | 702 | WGQGTQ | 787 |
| | | MNSLKPEDTAVYYCNA | | | | VTVSS | |
| IL6RPMP107H2 | 533 | RFTASRDNAKNTLYLQ | 618 | SNRYDYAD | 703 | RGQGTQ | 788 |
| | | MNSLKPEDTAVYYCTN | | FSAV | | VTVSS | |
| IL6RPMP107H5 | 534 | RFAISRDGAKNTVHLR | 619 | YQAGWGDY | 704 | WGQGTQ | 789 |
| | | MSSLKPEDTAVYYCNA | | | | VTVSS | |
| IL6RPMP108C10 | 535 | RFAISRDNAKNTVYLQ | 620 | GAWSSLRS | 705 | WGQGTQ | 790 |
| | | MNSLLPEDTAVYTCAA | | TAANY | | VTVSS | |
| IL6RPMP108C9 | 536 | RFNISRDNRENTVYLQ | 621 | NTYYSGAY | 706 | WGQGTQ | 791 |
| | | MNSLKPEDTAVYYCAA | | FPRGHEWY | | VTVSS | |
| | | | | EY | | | |
| IL6RPMP108D1 | 537 | RFAISRDNAKNTVYLQ | 622 | GAWSSLRS | 707 | WGQGTK | 792 |
| | | MNSLLPEDTAVYTCAA | | TAANY | | VTVSS | |
| IL6RPMP108D10 | 538 | RFAISRDNAKNTVYLQ | 623 | GAWSSLRS | 708 | WGQGTQ | 793 |
| | | MNSLLPEDTAVYTCAA | | TAANY | | VTVSS | |
| IL6RPMP108D2 | 539 | RFTISSDNAKNTVYLQ | 624 | EPPDSSWY | 709 | WGQGTQ | 794 |
| | | MNSLKPEDTAVYYCAA | | LDGSPEFF | | VTVSS | |
| | | | | KY | | | |
| IL6RPMP108E1 | 540 | RFTISSDNAKNTVYLQ | 625 | EPPDSSWY | 710 | WGQGTQ | 795 |
| | | MNSLKPEDTAVYYCAA | | LDGSPEFF | | VTVSS | |
| | | | | KY | | | |
| IL6RPMP108E9 | 541 | RFTASRDTSENRMYLQ | 626 | RTKDNTLF | 711 | WGQGTQ | 796 |
| | | MNGLKPEDTAVYYCAA | | TPAEEYDY | | VTVSS | |
| IL6RPMP108F7 | 542 | RFAISRDNAKNTVYLQ | 627 | GAWSSLRS | 712 | WGQGTQ | 797 |
| | | MNSLLPEDTAVYTCAA | | TAANY | | VTVSS | |
| IL6RPMP119A10 | 543 | RFTISKDNAKNTVYLQ | 628 | GRYEGGVW | 713 | WGQGTQ | 798 |
| | | MNGLKPDDTAVYYCGL | | RDY | | VTVSS | |
| IL6RPMP120A1 | 544 | RFTISRDNAKNTVYLQ | 629 | STKYYSST | 714 | WGQGTQ | 799 |
| | | MNSLKSEDTAVYYCAA | | YNYIHPAF | | VTVSS | |
| | | | | YDI | | | |
| IL6RPMP120A5 | 545 | RFTISRDNAKNTVYLQ | 630 | STKYYSST | 715 | WGQGTQ | 800 |
| | | MNSLKSEDTAVYYCAA | | YNYIHPAF | | VTVSS | |
| | | | | YDI | | | |
| IL6RPMP120B2 | 546 | RFTISRDNAKNTVYLQ | 631 | STKYYSST | 716 | WGQGTQ | 801 |
| | | MNSLKSEDTAVYYCAA | | YNYTHPAF | | VTVSS | |
| | | | | YDI | | | |
| IL6RPMP120B7 | 547 | RFTISRDNAKNTVYLQ | 632 | STKYYSST | 717 | WGQGTQ | 802 |
| | | MNSLKSEDTAVYYCAA | | YNYIHPAF | | VTVSS | |
| | | | | YDI | | | |
| IL6RPMP120C1 | 548 | RFTISRDNAKNTVYLQ | 633 | STKYYSST | 718 | WGQGTQ | 803 |
| | | MNSLKSEDTAVYYCAA | | YNYIHPAF | | VTVSS | |
| | | | | YDI | | | |
| IL6RPMP120C10 | 549 | RFTISRDNAKNTVYLQ | 634 | STKYYSST | 719 | WGQGTQ | 804 |
| | | MNSLKSEDTAVYYCAA | | YNYIHPAF | | VTVSS | |
| | | | | YDI | | | |
| IL6RPMP120C11 | 550 | RFTISRDNAKNTVYLQ | 635 | STKYYSST | 720 | WGQGTQ | 805 |
| | | MNSLKSEDTAVYYCAA | | YNYIHPAF | | VTVSS | |
| | | | | YDI | | | |
| IL6RPMP120C5 | 551 | RFTISRNNAANTGALQ | 636 | TMVPRAMV | 721 | WGQGTQ | 806 |
| | | MNSLKLEDTAVYYCAA | | VDEFEY | | VTVSS | |
| IL6RPMP120D2 | 552 | RFTISRDNAKNTVYLQ | 637 | STKYYSST | 722 | WGQGTQ | 807 |
| | | MNSLKSEDTAVYYCAA | | YNYIHPAF | | VTVSS | |
| | | | | YDI | | | |
| IL6RPMP120F4 | 553 | RFISSQDDAKNTVYLQ | 638 | AHGSSTYNY | 723 | WGQGTQ | 808 |
| | | MNSLKPEDTAIYYCAI | | | | VTVSS | |
| IL6RPMP120G11 | 554 | RFTVSRDNAKSVVYLQ | 639 | DIRGRENF | 724 | WGQGTQ | 809 |
| | | MNRLKPEDTSVYYCAG | | GS | | VTVSS | |
| IL6RPMP120G6 | 555 | RLTISRDNAKNSVYLQ | 640 | YYRYGSSV | 725 | WGQGTQ | 810 |
| | | MNSLNPEDTAVYYCSA | | PQY | | VTVSS | |
| IL6RPMP120H6 | 556 | RFTISRDNAKNTVYLQ | 641 | PTENQPDH | 726 | WGQGTQ | 811 |
| | | MNSLKPEDTAVYYCAI | | | | VTVSS | |

TABLE A-2
Amino acid sequences that make up the
reference compounds

REFERENCE IGG HEAVY CHAIN, SEQ ID NO: 126
QVQLQESGPGLVRPSQTLSLTCTVSGYSITSDHAWSWVRQPPGRGLEWIG
YISYSGITTYNPSLKSRVTMLRDTSKNQFSLRLSSVTAADTAVYYCARSL
ARTTAMDYWGQGSLVTVSSASTKGPSVFPLAPSSKSTSGGTAALGCLVKD
YFPEPVTVSWNSGALTSGVHTFPAVLQSSGLYSLSSVVTVPSSSLGTQTY
ICNVNHKPSNTKVDKKVEPKSCDKTHTCPPCPAPELLGGPSVFLFPPKPK
DTLMISRTPEVTCVVVDVSHEDPEVKFNWYVDGVEVHNAKTKPREEQYNS
TYRVVSVLTVLHQDWLNGKEYKCKVSNKALPAPIEKTISKAKGQPREPQV
YTLPPSRDELTKNQVSLTCLVKGFYPSDIAVEWESNGQPENNYKTTPPVL
DSDGSFFLYSKLTVDKSRWQQGNVFSCSVMHEALHNHYTQKSLSLSPGK
REFERENCE IGG LIGHT CHAIN, SEQ ID NO: 127
[sequence omitted]
REFERENCE FAB HEAVY CHAIN, SEQ ID NO: 128
QVQLQESGPGLVRPSQTLSLTCTVSGYSITSDHAWSWVRQPPGRGLEWIG
YISYSGITTYNPSLKSRVTMLRDTSKNQFSLRLSSVTAADTAVYYCARSL
ARTTAMDYWGQGSLVTVSSASTKGPSVFPLAPSSKSTSGGTAALGCLVKD
YFPEPVTVSWNSGALTSGVHTFPAVLQSSGLYSLSSVVTVPSSSLGTQTY
ICNVNHKPSNTKVDKKVEPKSC
REFERENCE FAB LIGHT CHAIN, SEQ ID NO: 129
[sequence omitted]
IL6R300, SEQ ID NO: 130
[sequence omitted]

TABLE A-3
Protein sequences of monovalent anti-IL-6R Nanobodies

>IL6RPMP100A10, SEQ ID NO: 132
EVQLVESGGGLVQAGGSLRLSCAASGRGFSPYTMGWFRQAPGKERVFVAGISWSTGIAHYTD
SVKGRFTISRDNAKNTGSLQMNSLKPEDTAVYYCAVVQTTKGNYDYWGQGTQVTVSS
>IL6RPMP100A6, SEQ ID NO: 133
EVQLVESGGGLVQAGDSLRLSCLASGRSFKDDAMGWFRQAPGKEREFVSGIDWRGNIVDAES
VKGRFTISRENAKNTLYLQMNHLKPEDTAVYYCAASSVFSDLRYRKNPKYWGQGTQVTVSS
>IL6RPMP100D11, SEQ ID NO: 134
EVQLVESGGGLVQAGDSLRLSCLASGRSFKDDAMGWFRQAPGKEREFVSGIDWRGNIVDAES
VKGRFTISRENAKNTLYLQMNHLKPEDTAVYYCAASSVFSDLRYRKNPKYWGQGTQVTVSS
>IL6RPMP100G11, SEQ ID NO: 135
EVQLVESGGGLVQAGGSLRLSCAASGRGFSPYTMGWFRQAPGKERVFVAGISWSTGIAHYTD
SVKGRFTISRDNAKNTGSLQMNSLKPEDTAVYYCAVVQTTKGNYDYWGQGTQVTVSS
>IL6RPMP101A1, SEQ ID NO: 136
EVQLVESGGGTVQAGGSLKLSCAASGRTFTNYAMGWFRQAPGKEREFVAAIAYATHFADSVK
GRFTISRGNAKNTVYLQMNSLKPEDTAVYYCAADLSLSKMVSKITSDMDYWGKGTLVTVSS
>IL6RPMP101A3, SEQ ID NO: 137
EVQLVESGGGLVQAGGPLRLSCTASGRTFTDYDMGWFRQAPGKEREVVAIIDTNGDNTLTVG
SVKGRFAISSDNAKNTVYLQMNSLLPEDTAVYTCAAGAWSALRRSVANYWGQGTQVTVSS
>IL6RPMP101A4, SEQ ID NO: 138
EVQLVESGGGTVQAGGSLKLSCAASGRTFTNYAMGWFRQAPGKEREFVAAIAYATHFADSVK
GRFTISRGNAKNTVYLQMNSLKPEDAAVYYCAADLSLSKMVSKITSDMDYWGKGTLVTVSS
>IL6RPMP101A5, SEQ ID NO: 139
EVQLVESGGGLVQAGGSLRLSCTASGRTFSDYDMGWFRQAPGKERECVAIIDTNGDNTLIVG
SVKGRFAISSDNAKNTVYLQMNSLLPEDTAVYTCAAGVWSSLRHTAANYWGQGTQVTVSS
>IL6RPMP101B12, SEQ ID NO: 140
EVQLVESGGGLVQPGGSLRLSCAASGVTLDYYAIGWFRQAPGKEREGVSSISSNDGSTFYAD
SVKGRFTISRDKAKNTVYLQMNSLKPEDTAVYYCAATYLTAQAVGVPVAYYEFDYWGQGTQVTVSS
>IL6RPMP101B2, SEQ ID NO: 141
EVQLVESGGGLVQAGGSLRLSCTASGRTFTDYDMGWFRQAPGKEREVVAIIDTNGDNTLTVG
SVKGRFAISSDNAKNTVYLQMNSLLPEDTAVYTCAAGAWSALRRSVANYWGQGTQVTVSS
>IL6RPMP101B3, SEQ ID NO: 142
EVQLVESGGGLVQAGGSLRLSCAASGSIFRINAMGWYRQAPGKQRELVAAAISGGSTNYADF
VKGRFTISRDNAKNTVYLQMNSLKPEDTAVYYCNALVVSHNYSDYVPFPDDYWGQGTQVTVSS
>IL6RPMP101B6, SEQ ID NO: 143
EVQLVESGGGLVQAGGSLRLSCAASGSDFSIKAMGWYRQAPGKQRELVARITSGGSTVYADS
VKGRFTISRDNAKNTVYLQMNSLKPEDATVYYCNAIVTYSDYDLGNDYWGQGTQVTVSS
>IL6RPMP101C2, SEQ ID NO: 144
EVQLVESGGGLVQAGGSLRLSCTASGRTFSDYDMGWFRQAPGKERECVAIIDTNGDNTLIVG
SVKGRFAISSDNAKNTVYLQMNSLLPEDTAVYTCAAGVWSSLRHTAANYWGQGTQVTVSS
>IL6RPMP101C3, SEQ ID NO: 145
EVQLVESGGGLVRAGGSLRLSCAASGFAFDDYAIGWFRQAPGKEREGVSSISSSNGNTYYAD
SVRGRFTISSDNAKNTVYLQMNSLKPEDTGVYYCAAIWGIFFNEKMPVGAYDYWGQGTQVTVSS
>IL6RPMP101D1, SEQ ID NO: 146
EVQLVESGGGLVQAGGSLRLSCTASGRTFSDYDMGWFRQAPGKERECVAIIDTNGDNTLIVG
SVKGRFAISSDNAKNTVYLQMNSLLPEDTAVYTCAAGVWSSLRHTAANYWGQGTQVTVSS
>IL6RPMP101D2, SEQ ID NO: 147
EVQMVESGGGLVQAGGSLRLSCAASGFAFDDYAIGWFRQAPGKEREGVSSISSSNGNTYYAD
SVRGRFTISSDNAKNTVYLQMNSLKPEDAGVYYCAAIWGIFFNEKMPVGAYDYWGQGTQVTVSS
>IL6RPMP101D6, SEQ ID NO: 148
EVQLVESGGGLVQAGGSLRLSCTASGRTFSDYDMGWFRQAPGKERECVAIIDTNGDNTLIVG
SVKGRFAISSDNAKNTVYLQMNSLLPEDTAVYTCAAGVWSSLRHTAANYWGQGTQVTVSS
>IL6RPMP101E1, SEQ ID NO: 149
EVQLVESGGGLVQAGGSLRLSCAASGFAFDDYAIGWFRQAPGKEREGVSSISSSNGNTYYAD
SVRGRFTISSDNAKNTVYLQMNSLKPEDTGVYYCAAIWGIFFNEKMPVGAYDYWGQGTQVTVSS
>IL6RPMP101F1, SEQ ID NO: 150
EVQLVESGGGLVQAGGSLRLSCAASGFAFDDYAIGWFRQAPGKEREGVSSISSSNGNTYYAD
SVRGRFTISSDNAKNTVYLQMNSLKPEDTGVYYCAAIWGIFFNEKMPVGAYDYWGQGTQVTVSS
>IL6RPMP101F2, SEQ ID NO: 151
EVQLVESGGGLVQAGGSLRLSCAASGFAFDDYAIGWFRQAPGKEREGVSSISSSNGNTYYAD
SVRGRFTISSDNAKNTVYLQMNSLKPEDTGVYYCAAIWGIFFNEKMPVGAYDYWGQGTQVTVSS
>IL6RPMP101F3, SEQ ID NO: 152
EVQLVESGGGLVQAGGSLRLSCAASGFAFDDYAIGWFRQAPGKEREGVSSISSSNGNTYYAD
SVRGRFTISSDNAKNTVYLQMNSLKPEDTGVYYCAAIWGIFFNEKMPVGAYDYWGQGTQVTVSS
>IL6RPMP101F6, SEQ ID NO: 153
EVQLVESGGGLVQAGGSLRLSCAASGSIFSIKAMGWYRQAPGKQRELVARITSGGSTYYADS
VKGRFTISRDNAKNTVYLQMNSLKPEDTAVFYCNAIVTDSDYDLGNDYWGQGTQVTVSS
>IL6RPMP101G1, SEQ ID NO: 154
EVQLVESGGGLVQPGGSLRLSCAASGGTLDYYAIGWFRQAPGKEREGVSCISSSDGSTYYAS
SVKGRFTVSRDKAKNTVYLQMNSLKPEDTAVYYCAFVFTTAQAMGVPNNPYEYDFWGQGTQVTVSS
>IL6RPMP101G11, SEQ ID NO: 155
EVQLVESGGGLVQPGGSLRLSCAASASGFTLDYYAIGWFRQAPGKEREGVSCISSTDGSTYY
ADSVKGRFTISRDNAKNTVYLQMNSLNPEDTGVYTCAAVLTTAQAMGVPTRSYEYDYWGQGTQVTVSS
>IL6RPMP101G2, SEQ ID NO: 156
EVQLVESGGGLVQAGGSLRLSCAASGSIFRINAMGWYRQAPGKQRELVAAAISGGSTNYADF
VKGRFTISRDNAKNTVYLQMNSLKPEDTAVYYCNALVVSHNYSDYVPFPDDYWGQGTQVTVSS
>IL6RPMP101G3, SEQ ID NO: 157
EVQLVESGGGLVQAGGSLRLSCTASGRTFSDYDMGWFRQAPGKERECVAIIDTNGDNTLIVG
SVKGRFAISSDNAKNTVYLQMNSLLPEDTAVYTCAAGVWSSLRHTAANYWGQGTQVTVSS
>IL6RPMP101G4, SEQ ID NO: 158
EVQLVESGGGLVQAGGSLRLSCAASGFAFDDYAIGWFRQAPGKEREGVSSISSSNGNTYY
ADSVRGRFTISSDNAKNTVYLQMNSLKPEDTGVYYCAAIWGIFFNEKMPVGAYDYWGQGTQVTVSS
>IL6RPMP101H3, SEQ ID NO: 159
EVQLVESGGGLVQAGGSLRLSCAASGFAFDDYAIGWFRQAPGKEREGVSSISSSNGNTYY
ADSVRGRFTISSDNAKNTVYLQMNSLKPEDTGVYYCAAIWGIFFNEKMPVGAYDYWGQGTQVTVSS
>IL6RPMP101H6, SEQ ID NO: 160
EVQLVESGGGLVQAGGSLRLSCTASGRTFTDYDMGWFRQAPGKEREVVAIIDTNGDNTLT
VGSVKGRFAISSDNAKNTVYLQMNSLLPEDTAVYTCAAGAWSALRRSVANYWGQGTQVTVSS
>IL6RPMP102G3, SEQ ID NO: 161
EVQLVESGGGLVQAGGSLRLSCAASGSIDRINAMGWYRQAPGKQRDFLAVITDGDKTLYA
DSVKGRFTISNDNAKNTVYLQMNSLKPEDTAVYYCNAYQAGWGDYWGQGTQVTVSS
>IL6RPMP103A2, SEQ ID NO: 162
EVQLVESGGGLVQPGGSLRLSCAASGSIFSINTMGWYRQVPGKQRELVATVRSGSITNYA
DSVQDQFTITRDIDENTVYLQMNSLKPEDTAVYYCLTRASVPGRGYQDYWGQGTQVTVSS
>IL6RPMP103A4, SEQ ID NO: 163
EVQLVESGGGLVQPGGSLRLSCAASGSIFSINTMGWYRQVPGKQRELVATVRSGSITNYA
DSVQDRFTITRDIDENTVYLQMNSLKPEDTAVYYCLTRASVPGRGYQDYWGQGTQVTVSS
>IL6RPMP103A5, SEQ ID NO: 164
EVQLVESGGGLVQAGDSLRLSCVASGLPFSTLHMGWFRQAPGKEHESVSAISSDGGSEYY
AGSVKGRFTISRDNAKNTVYLQMNSLKPEDTAVYYCAADPRRIGANIKYSDYWGQGTQVTVSS
>IL6RPMP103B2, SEQ ID NO: 165
EVQLVESGGGLVQPGGSLRLSCAASGSTFSINMMAWYCQAPGKQRELVASISSGGGINYA
DSVKGRFTISRDYAENSVDLQMNSLKPEDTAVYYCNARGTYLNGDHYSTNYNSWGQGTQVTVSS
>IL6RPMP103C3, SEQ ID NO: 166
EVQLVESGGGLVQPGGSMRLSCAATGAIFSISTMGWYRQAPGAQREFVAGVGLDGTPNYA
DSVKGRFTISRDNTKNTVSLQMENLKPEDTGVYYCNIDEGMDYDGNFYDRWGQGTQVTVSS
>IL6RPMP103C4, SEQ ID NO: 167
EVQLVESGGGLVEAGGSLRLSCAAAGRTLSSYSMAWFRQAPGKEREFVAIIRGNPSRTYH
SDSVKGRFTASRDNAKNTVYLQMNRLEPEDTAVYYCAADPPPFASDYSAPQSYDYWGQGTQVTVSS
>IL6RPMP103C7, SEQ ID NO: 168
EVQLVESGGGLVQAGGSLSLSCATSGRTISDDTMAWFRQAPGKEREFVATITFSGARTHY
SDSVRDRFTISRDNAKNTVYLQMDSLKSEDTAVYYCAASTKYYSSTYNYIHPAFYDIWGQGTQVTVSS
>IL6RPMP103D7, SEQ ID NO: 169
EVQLVESGGGLVEAGGSLRLSCAAAGRTLSSYSMAWFRQAPGKEREFVAIIRGNPSRTYH
SDSVKGRFTASRDNAKNTVYLQMNRLEPEDTAVYYCAADPPPFASDYSAPQSYDYWGQGTQVTVSS
>IL6RPMP103F2, SEQ ID NO: 170
EVQLVESGGGLVQAGGSLRLSCVASGHTSDTYIMAWFRQAPGKEREFVASILWDGSITYY
ADSVKDRFTISRDISRKTLYLQMNSLRPEDTATYTCARGIYFSRRYVDPGIYGTWGQGTQVTVSS
>IL6RPMP103H9, SEQ ID NO: 171
EVQLVESGGGLVQPGGSLRLSCAASKSIFDINAMYWHRQAPGKQRESVASITSGGMRNYA
DSVKDRFTISKDNAKNTVYLQMNGLKPDDTAVYYCGLGRYEGGVWRDYWGQGTQVTVSS
>IL6RPMP104A8, SEQ ID NO: 172
EVQLVESGGGLVQAGGSLRLSCTASGRTFSDYDMGWFRQAPGKEREFVAVIDTNGGHTLT
VGSVKGRFAISSDNAKNTVYLQMNSLVPEDTAVYTCAAGAWSSLRKTAASYWGQGTQVTVSS
>IL6RPMP104B8, SEQ ID NO: 173
EVQLVESGGGLVQAGGSLRLSCAASGFAFDDYAIGWFRQAPGKEREGVSSISSSNGNTYY
ADSVRGRFTISSDNAKNTVYLQMNSLKPEDTGVYYCAAIWGIFFNEKMPVGAYDYWGQGTQVTVSS
>IL6RPMP104B9, SEQ ID NO: 174
EVQLVESGGGLVQAGGSLRLSCTASGRTFSDYDMGWFRQAPGKERECVAIIDTNGDNTLI
VGSVKGRFAISSDNAKNTVYLQMNSLLPEDTAVYTCAAGVWSSLRHTAANYWGQGTQVTVSS
>IL6RPMP104E4, SEQ ID NO: 175
EVQLVESGGGTVQAGGSLKLSCAASGRTFTNYAMGWFRQAPGKEREFVAAIAYATHFADS
VKGRFTISRGNAKNTVYLQMNSLKPEDTAVYYCAADLSLSKMVSKITSDMDYWGKGTLVTVSS
>IL6RPMP104E7, SEQ ID NO: 176
EVQLVESGGGLVQAGGSLRLSCAAGGSIFSINAMGWYRQAPGKQRELVASITSGGSTTYA
DSVKGRFTISRDNAKDTVYLQMNSLKPEDTAVYYCNAHIRFPFPNDYWGQGTQVTVSS
>IL6RPMP105B8, SEQ ID NO: 177
EVQLVESGGGLVRAGGSLRLSCAASGFAFDDYAIGWFRQAPGKEREGVSSISSSNGNTYY
ADSVRGRFTISSDNAKNTVYLQMNSLKPEDTGVYYCAAIWGIFFNEKMPVGAYDYWGQGTQVTVSS
>IL6RPMP105C2, SEQ ID NO: 178
EVQLVESGGGLVQAGGSLRLSCAASGSIFRINAMGWYRQAPGEQRELVAAAISGGSTNYA
DFVKGRFTISRDNAKNTVYLQMNSLKPEDTAVYYCNALVVSHNYSDYVPFPDDYWGQGTQVTVSS
>IL6RPMP105D3, SEQ ID NO: 179
EVQLEESGGGLVQAGGSLRLSCAASGSIFRINAMGWYRQAPGKQRELVAAAISGGSTNYA
DFVKGRFTISRDNAKNTVYLQMNSLKPEDTAVYYCNALVVSHNYSDYVPFPDDYWGQGTQVTVSS
>IL6RPMP105E1, SEQ ID NO: 180
EVQLVESGGGLVQAGGSLRLSCAASGSIFSIKAMGWYRQAPGKQRELVARITSGGSTYYA
DSVKGRFTISRDNAKNTVYLQMNSLKPEDTAVFYCNAIVTDSDYDLGNDYWGQGTQVTVSS
>IL6RPMP105E11, SEQ ID NO: 181
EVQLVESGGGLVQAGGSLRLSCAASGFAFDDYAIGWFRQAPGKEREGVSSISSSNGNTYY
ADSVRGRFTISSDNAKNTVYLQMNGLKPEDTGVYYCAAIWGIFFNEKMPVGAYDYWGQGTQVTVSS
>IL6RPMP105H10, SEQ ID NO: 182
EVQMVESGGGLVQAGGSLRLSCAASGFAFDDYAIGWFRQAPGKEREGVSSISSSNGNTYY
ADSVRGRFTISSDNAKNTVYLQMNSLKPEDAGVYYCAAIWGIFFNEKMPVGAYDYWGQGTQVTVSS
>IL6RPMP106B2, SEQ ID NO: 183
EVQLVESGGGLVQAGGSLRLSCAASGSIFRINAMGWYRQAPGKQRELVAAAISGGSTNYA
DFVKGRFTISRDNAKNTVYLQMNSLKPEDTAVYYCNALVVSHNYSDYVPFPDDYWGQGTQVTVSS
>IL6RPMP106D6, SEQ ID NO: 184
EVQLVESGGGLVQAGGSLRLSCAASGFTFDDYAIGWFRQAPGKEREGVSCMISSDGSTYY
ADSVKGRFTISSDNAKNTVYLQMDSLKPEDTAVYYCAADLSLYGCYVGDRDLYDYDYWGQGTQVTVSS
>IL6RPMP106F4, SEQ ID NO: 185
EVQLVESGGGLVQAGGSLRLSCAASGSIFRINAMGWYRQAPGKQRELVAAAISGGSTNYA
DFVKGRFTISRDNAKNTVYLQMNSLKPGDTAVYYCNALVVSHNYSDYVPFPDDYWGQGTQVTVSS
>IL6RPMP106F7, SEQ ID NO: 186
EVQLVESEGGLVQAGGSLRLSCAASGSIFRINAMGWYRQAPGKQRELVAAAISGGSTNYA
DFVKGRFTISRDNAKNTVYLQMNSLKPEDTAVYYCNALVVSHNYSDYVPFPDDYWGQGTQVTVSS
>IL6RPMP107A1, SEQ ID NO: 187
EVQLVESGGGLVQAGGSLNLSCNASGDIGSINAMGWYRQAPGQQREWVAVITDTDSTIYP
DSVKGRFAISRDGAKNTVHLRMSSLKPEDTAVYYCNAYQAGWGDYWGQGTQVTVSS
>IL6RPMP107A9, SEQ ID NO: 188
EVQLVESGGGLVQAGGSLRLSCAASGGIFSDMFMGWFRQAPGKSRESVARISPSGNTFYQ
DSVRGRFTISTDNAKNTVYLQMNNLKPEDTAVYYCAANVGVTGSYEYWGQGTQVTVSS
>IL6RPMP107B4, SEQ ID NO: 189
EVQLVESGGGLVQAGGSLRLSCVASGLRLNMHRMGWFRQAPGKEREFVARIFTDDGDSYY
ADSVQGRFTISGDNAKNTVYLQMNSLKPEDTGVYFCAAGYMSGAESPIGYDNWGQGTQVTVSS
>IL6RPMP107C3, SEQ ID NO: 190
EVQLVESGGGLVQAGGSLNLSCNASGDIGSINAMGWHRQAPGQQREWVAVITDTDSTIYP
DSVKGRFAISRDGAKNTVHLRMSSLKPEDTAVYYCNAYQAGWGDYWGQGTQVTVSS
>IL6RPMP107E4, SEQ ID NO: 191
EVQLVESGGGLVQAGGSLRLSCAASGSIDRINAMGWYRQAPGKQRDFLAVITDGDKTLYA
DSVKGRFTISNDNAKNTVYLQMNSLKPEDTAVYYCNAYQAGWGDYWGQGTQVTVSS
>IL6RPMP107G10, SEQ ID NO: 192
EVQLVESGGGLVQAGGSLRLSCAASGSIENINAMGWYRQAPGKQRDFLAIITDGSKTLYA
DSVKGRFTISNDNAKNTVYLQMNSLKPEDTAVYYCNAYQAGWGDYWGQGTQVTVSS
>IL6RPMP107H2, SEQ ID NO: 193
KVQLVESGGGLVQPGGSLRLSCAASGFTFSSYAMSWVRRAPGKGLEWVSAINSDGTGSSY
APFVTGRFTASRDNAKNTLYLQMNSLKPEDTAVYYCTNSNRYDYADFSAVRGQGTQVTVSS
>IL6RPMP107H5, SEQ ID NO: 194
EVPLVESGGGLVQAGGSLNLSCNASGDIGSINAMGWYRQAPGQQREWVAVITDTDSTIYP
DSVKGRFAISRDGAKNTVHLRMSSLKPEDTAVYYCNAYQRGWGDYWGQGTQVTVSS
>IL6RPMP108C10, SEQ ID NO: 195
EVQLVESGGGLVQPGGSLRLSCTASGRTFSDYDMGWFRQAPGKERECVAVIDTNGDNTLT
VGSVKGRFAISRDNAKNTVYLQMNSLLPEDTAVYTCAAGAWSSLRSTAANYWGQGTQVTVSS
>IL6RPMP108C9, SEQ ID NO: 196
EVQLVESGGGLVQAGGSLRLSCAASGRTYAMAWFRQAPGKEREFVAAISIVTDYADSVKG
RFNISRDNRENTVYLQMNSLKPEDTAVYYCAANTYYSGAYFPRGHEWYEYWGQGTQVTVSS
>IL6RPMP108D1, SEQ ID NO: 197
EVQLVESGGGLVQAGGSLRLSCTASGRTFSDYDMGWFRQAPGKERECVAVIDTNGDNTLT
VGSVKGRFAISRDNAKNTVYLQMNSLLPEDTAVYTCAAGAWSSLRSTAANYWGQGTKVTVSS
>IL6RPMP108D10, SEQ ID NO: 198
EVQLVESGGGSVQAGGSLRLSCTASGRTFSDYDMGWFRQAPGKERECVAVIDTNGDNTLT
VGSVKGRFAISRDNAKNTVYLQMNSLLPEDTAVYTCAAGAWSSLRSTAANYWGQGTQVTVSS
>IL6RPMP108D2, SEQ ID NO: 199
EVQLVESGGGLVQAGGSLRLSCAASGFTFDDYDIGWFRQAPGKEREGVSGISSSDGNTYY
ADSVKGRFTISSDNAKNTVYLQMNSLKPEDTAVYYCAAEPPDSSWYLDGSPEFFKYWGQGTQVTVSS
>IL6RPMP108E1, SEQ ID NO: 200
EVQLVESGGGLVQAGGSLRLSCAASGFTFDDYDIGWFRQAPGKEREGVSGISSSDGNTYY
ADSVKGRFTISSDNAKNTVYLQMNSLKPEDTAVYYCAAEPPDSSWYLDGSPEFFKYWGQGTQVTVSS
>IL6RPMP108E9, SEQ ID NO: 201
EVQLVESGGGLVQAGGSLRLSCAFSRRSFGNFPMGWFRQRPGEEREYVAVISWNNNYIHY
RDSVKGRFTASRDTSENRMYLQMNGLKPEDTAVYYCAARTKDNTLFTPAEEYDYWGQGTQVTVSS
>IL6RPMP108F7, SEQ ID NO: 202
EVQLVESGGGLVQAGGSLRLSCTASGRTFSDYDMGWFRQAPGKERECVAVIDTNGDNTLT
VGSVKGRFAISRDNAKNTVYLQMNSLLPEDTAVYTCAAGAWSSLRSTAANYWGQGTQVTVSS
>IL6RPMP119A10, SEQ ID NO: 203
EVQLVESGGGLVQPGGSLRLSCAASKSIFDINAMYWHRQAPGKQRESVASITSGGMRNYA
DSVKDRFTISKDNAKNTVYLQMNGLKPDDTAVYYCGLGRYEGGVWRDYWGQGTQVTVSS
>IL6RPMP120A1, SEQ ID NO: 204
EVQLVESGGGLVQAGGSLSLSCATSGRTISDDTMAWFRQAPGKEREFVATITFSGARTHY
SDSVRDRFTISRDNAKNTVYLQMNSLKSEDTAVYYCAASTKYYSSTYNYIHPAFYDIWGQGTQVTVSS
>IL6RPMP120A5, SEQ ID NO: 205
EVQLVESGGGLVQAGGSLSLSCATSGRTISDDTMAWFRQAPGKEREFVAIITFNGARTHY
SDSVRDRFTISRDNAKNTVYLQMNSLKSEDTAVYYCAASTKYYSSTYNYIHPAFYDIWGQGTQVTVSS
>IL6RPMP120B2, SEQ ID NO: 206
EVQLVESGGGLVQAGGSLSLSCATSGRTISDDTMAWFRQAPGKEREFVATITFSGARTHY
SDSVRDRFTISRDNAKNTVYLQMNSLKSEDTAVYYCAASTKYYSSTYNYIHPAFYDIWGQGTQVTVSS
>IL6RPMP120B7, SEQ ID NO: 207
EVQLVESGGGLVQAGGSLSLSCATSGRTISDDTMAWFRQAPGKEREFVATITFSGARTHY
SDSVRDRFTISRDNAKNTVYLQMNSLKSEDTAVYYCAASTKYYSSTYNYIHPAFYDIWGQGTQVTVSS
>IL6RPMP120C1, SEQ ID NO: 208
EVQLVESGGGLVQAGGSLSLSCATSGRTISDDTMAWFRQAPGKEREFVATITFSGARTHY
SDSVRDRFTISRDNAKNTVYLQMNSLKSEDTAVYYCAASTKYYSSTYNYIHPAFYDIWGQGTQVTVSS
>IL6RPMP120C10, SEQ ID NO: 209
EVQLVESGGGLVQAGGSLSLSCATSGRTISDDTMAWFRQAPGKEREFVAIITFNGARTHY
SDSVRDRFTISRDNAKNTVYLQMNSLKSEDTAVYYCAASTKYYSSTYNYIHPAFYDIWGQGTQVTVSS
>IL6RPMP120C11, SEQ ID NO: 210
EVQLVESGGGLVQAGGSLSLSCATSGRTISDDTMAWFRQAPGKEREFVATITFSGARTHY
SDSVRDRFTISRDNAKNTVYLQMNSLKSEDTAVYYCAASTKYYSSTYNYIHPAFYDIWGQGTQVTVSS
>IL6RPMP120C5, SEQ ID NO: 211
EVQLVESGGRSVQAGGSLRLSCAASGRTFRDYAMGWFRQAPGKEREFVAVISWSGAYTEY
ADSVKGRFTISRNNAANTGALQMNSLKLEDTAVYYCAATMVPRAMVVDEFEYWGQGTQVTVSS
>IL6RPMP120D2, SEQ ID NO: 212
EVQLVESGGGLVQAGGSLSLSCATSGRTISDDTMAWFRQAPGKEREFVATITFSGARTHY
SDSVRDRFTISRDNAKNTVYLQMNSLKSEDTAVYYCAASTKYYSSTYNYIHPAFYDIWGQGTQVTVSS
>IL6RPMP120F4, SEQ ID NO: 213
EVQLVESGGGLVQTGGSLRLSCAVSGRTDSTASVGWFRQAPGKQREWVVGISSGGSTHYA
DSVKGRFISSQDDAKNTVYLQMNSLKPEDTAIYYCAIAHGSSTYNYWGQGTQVTVSS
>IL6RPMP120G11, SEQ ID NO: 214
EVQLVESGGGLVQAGGSVRLSCTASGGTLSGNAMGWFRQAPGTEREFVAAITWSGDMSVY
AEFVKGRFTVSRDNAKSVVYLQMNRLKPEDTSVYYCAGDIRGRENFGSWGQGTQVTVSS
>IL6RPMP120G6, SEQ ID NO: 215
EVQLVESGGDLVQTGGSLRLSCAASGITVSDRAMGWYRQAPGKQREMVAGVSRGGMTSYA
DSVKGRLTISRDNAKNSVYLQMNSLNPEDTAVYYCSAYYRYGSSVPQYWGQGTQVTVSS
>IL6RPMP120H6, SEQ ID NO: 216
EVQLVESGGGLVQPGGSLRLSCVVSGIIFSDNAMGWYRQYPGKQREWVAGISRGGTTGYT
DSVKGRFTISRDNAKNTVYLQMNSLKPEDTAVYYCAIPTENQPDHWGQGTQVTVSS

TABLE A-4
Protein sequences of biparatopic anti-IL-6R Nanobodies
(IL6R-IL6 inhibiting block combined with a non-inhibiting,
hybrid IL6R binding block)

IL6R120A5-GS9-IL6R101H6, SEQ ID NO: 812
EVQLVESGGGLVQAGGSLSLSCATSGRTISDDTMAWFRQAPGKEREFVAIITFNGARTHYSDS
VRDRFTISRDNAKNTVYLQMNSLKSEDTAVYYCAASTKYYSSTYNYIHPAFYDIWGQGTQVTV
SSGGGGSGGGSEVQLVESGGGLVQAGGSLRLSCTASGRTFTDYDMGWFRQAPGKEREVVAIID
TNGDNTLTVGSVKGRFAISSDNAKNTVYLQMNSLLPEDTAVYTCAAGAWSALRRSVANYWGQG
TQVTVSS
IL6R120A5-GS9-IL6R104E4, SEQ ID NO: 813
EVQLVESGGGLVQAGGSLSLSCATSGRTISDDTMAWFRQAPGKEREFVAIITFNGARTHYSDS
VRDRFTISRDNAKNTVYLQMNSLKSEDTAVYYCAASTKYYSSTYNYIHPAFYDIWGQGTQVTV
SSGGGGSGGGSEVQLVESGGGTVQAGGSLKLSCAASGRTFTNYAMGWFRQAPGKEREFVAAIA
YATHFADSVKGRFTISRGNAKNTVYLQMNSLKPEDTAVYYCAADLSLSKMVSKITSDMDYWGK
GTLVTVSS
IL6R120A5-GS9-IL6R103A4, SEQ ID NO: 814
EVQLVESGGGLVQAGGSLSLSCATSGRTISDDTMAWFRQAPGKEREFVAIITFNGARTHYSDS
VRDRFTISRDNAKNTVYLQMNSLKSEDTAVYYCAASTKYYSSTYNYIHPAFYDIWGQGTQVTV
SSGGGGSGGGSEVQLVESGGGLVQPGGSLRLSCAASGSIFSINTMGWYRQVPGKQRELVATVR
SGSITNYADSVQDRFTITRDIDENTVYLQMNSLKPEDTAVYYCLTRASVPGRGYQDYWGQGTQ
VTVSS
IL6R120G6-GS9-IL6R101H6, SEQ ID NO: 815
EVQLVESGGDLVQTGGSLRLSCAASGITVSDRAMGWYRQAPGKQREMVAGVSRGGMTSYADSV
KGRLTISRDNAKNSVYLQMNSLNPEDTAVYYCSAYYRYGSSVPQYWGQGTQVTVSSGGGGSGG
GSEVQLVESGGGLVQAGGSLRLSCTASGRTFTDYDMGWFRQAPGKEREVVAIIDTNGDNTLTV
GSVKGRFAISSDNAKNTVYLQMNSLLPEDTAVYTCAAGAWSALRRSVANYWGQGTQVTVSS
IL6R120G6-GS9-IL6R104E4, SEQ ID NO: 816
EVQLVESGGDLVQTGGSLRLSCAASGITVSDRAMGWYRQAPGKQREMVAGVSRGGMTSYADSV
KGRLTISRDNAKNSVYLQMNSLNPEDTAVYYCSAYYRYGSSVPQYWGQGTQVTVSSGGGGSGG
GSEVQLVESGGGTVQAGGSLKLSCAASGRTFTNYAMGWFRQAPGKEREFVAAIAYATHFADSV
KGRFTISRGNAKNTVYLQMNSLKPEDTAVYYCAADLSLSKMVSKITSDMDYWGKGTLVTVSS
IL6R120G6-GS9-IL6R103A4, SEQ ID NO: 817
EVQLVESGGDLVQTGGSLRLSCAASGITVSDRAMGWYRQAPGKQREMVAGVSRGGMTSYADSV
KGRLTISRDNAKNSVYLQMNSLNPEDTAVYYCSAYYRYGSSVPQYWGQGTQVTVSSGGGGSGG
GSEVQLVESGGGLVQPGGSLRLSCAASGSIFSINTMGWYRQVPGKQRELVATVRSGSITNYAD
SVQDRFTITRDIDENTVYLQMNSLKPEDTAVYYCLTRASVPGRGYQDYWGQGTQVTVSS
IL6R105E1-GS9-IL6R101H6, SEQ ID NO: 818
EVQLVESGGGLVQAGGSLRLSCAASGSIFSIKAMGWYRQAPGKQRELVARITSGGSTYYADSV
KGRFTISRDNAKNTVYLQMNSLKPEDTAVFYCNAIVTDSDYDLGNDYWGQGTQVTVSSGGGGS
GGGSEVQLVESGGGLVQAGGSLRLSCTASGRTFTDYDMGWFRQAPGKEREVVAIIDTNGDNTL
TVGSVKGRFAISSDNAKNTVYLQMNSLLPEDTAVYTCAAGAWSALRRSVANYWGQGTQVTVSS
IL6R105E1-GS9-IL6R104E4, SEQ ID NO: 819
EVQLVESGGGLVQAGGSLRLSCAASGSIFSIKAMGWYRQAPGKQRELVARITSGGSTYYADSV
KGRFTISRDNAKNTVYLQMNSLKPEDTAVFYCNAIVTDSDYDLGNDYWGQGTQVTVSSGGGGS
GGGSEVQLVESGGGTVQAGGSLKLSCAASGRTFTNYAMGWFRQAPGKEREFVAAIAYATHFAD
SVKGRFTISRGNAKNTVYLQMNSLKPEDTAVYYCAADLSLSKMVSKITSDMDYWGKGTLVTVS
S
IL6R105E1-GS9-IL6R103A4, SEQ ID NO: 820
EVQLVESGGGLVQAGGSLRLSCAASGSIFSIKAMGWYRQAPGKQRELVARITSGGSTYYADSV
KGRFTISRDNAKNTVYLQMNSLKPEDTAVFYCNAIVTDSDYDLGNDYWGQGTQVTVSSGGGGS
GGGSEVQLVESGGGLVQPGGSLRLSCAASGSIFSINTMGWYRQVPGKQRELVATVRSGSITNY
ADSVQDRFTITRDIDENTVYLQMNSLKPEDTAVYYCLTRASVPGRGYQDYWGQGTQVTVSS
IL6R103C4-GS9-IL6R101H6, SEQ ID NO: 821
EVQLVESGGGLVEAGGSLRLSCAAAGRTLSSYSMAWFRQAPGKEREFVAIIRGNPSRTYHSDS
VKGRFTASRDNAKNTVYLQMNRLEPEDTAVYYCAADPPPFASDYSAPQSYDYWGQGTQVTVSS
GGGGSGGGSEVQLVESGGGLVQAGGSLRLSCTASGRTFTDYDMGWFRQAPGKEREVVAIIDTN
GDNTLTVGSVKGRFAISSDNAKNTVYLQMNSLLPEDTAVYTCAAGAWSALRRSVANYWGQGTQ
VTVSS
IL6R103C4-GS9-IL6R104E4, SEQ ID NO: 822
EVQLVESGGGLVEAGGSLRLSCAAAGRTLSSYSMAWFRQAPGKEREFVAIIRGNPSRTYHSDS
VKGRFTASRDNAKNTVYLQMNRLEPEDTAVYYCAADPPPFASDYSAPQSYDYWGQGTQVTVSS
GGGGSGGGSEVQLVESGGGTVQAGGSLKLSCAASGRTFTNYAMGWFRQAPGKEREFVAAIAYA
THFADSVKGRFTISRGNAKNTVYLQMNSLKPEDTAVYYCAADLSLSKMVSKITSDMDYWGKGT
LVTVSS
IL6R103H9-GS9-IL6R101H6, SEQ ID NO: 823
EVQLVESGGGLVQPGGSLRLSCAASKSIFDINAMYWHRQAPGKQRESVASITSGGMRNYADSV
KDRFTISKDNAKNTVYLQMNGLKPDDTAVYYCGLGRYEGGVWRDYWGQGTQVTVSSGGGGSGG
GSEVQLVESGGGLVQAGGSLRLSCTASGRTFTDYDMGWFRQAPGKEREVVAIIDTNGDNTLTV
GSVKGRFAISSDNAKNTVYLQMNSLLPEDTAVYTCAAGAWSALRRSVANYWGQGTQVTVSS
IL6R103H9-GS9-IL6R104E4, SEQ ID NO: 824
EVQLVESGGGLVQPGGSLRLSCAASKSIFDINAMYWHRQAPGKQRESVASITSGGMRNYADSV
KDRFTISKDNAKNTVYLQMNGLKPDDTAVYYCGLGRYEGGVWRDYWGQGTQVTVSSGGGGSGG
GSEVQLVESGGGTVQAGGSLKLSCAASGRTFTNYAMGWFRQAPGKEREFVAAIAYATHFADSV
KGRFTISRGNAKNTVYLQMNSLKPEDTAVYYCAADLSLSKMVSKITSDMDYWGKGTLVTVSS
IL6R103H9-GS9-IL6R103A4, SEQ ID NO: 825
EVQLVESGGGLVQPGGSLRLSCAASKSIFDINAMYWHRQAPGKQRESVASITSGGMRNYADSV
KDRFTISKDNAKNTVYLQMNGLKPDDTAVYYCGLGRYEGGVWRDYWGQGTQVTVSSGGGGSGG
GSEVQLVESGGGLVQPGGSLRLSCAASGSIFSINTMGWYRQVPGKQRELVATVRSGSITNYAD
SVQDRFTITRDIDENTVYLQMNSLKPEDTAVYYCLTRASVPGRGYQDYWGQGTQVTVSS
IL6R107A1-GS9-IL6R101H6, SEQ ID NO: 826
EVQLVESGGGLVQAGGSLNLSCNASGDIGSINAMGWYRQAPGQQREWVAVITDTDSTIYPDSV
KGRFAISRDGAKNTVHLRMSSLKPEDTAVYYCNAYQAGWGDYWGQGTQVTVSSGGGGSGGGSE
VQLVESGGGLVQAGGSLRLSCTASGRTFTDYDMGWFRQAPGKEREVVAIIDTNGDNTLTVGSV
KGRFAISSDNAKNTVYLQMNSLLPEDTAVYTCAAGAWSALRRSVANYWGQGTQVTVSS
IL6R107A1-GS9-IL6R104E4, SEQ ID NO: 827
EVQLVESGGGLVQAGGSLNLSCNASGDIGSINAMGWYRQAPGQQREWVAVITDTDSTIYPDSV
KGRFAISRDGAKNTVHLRMSSLKPEDTAVYYCNAYQAGWGDYWGQGTQVTVSSGGGSSGGGSE
VQLVESGGGTVQAGGSLKLSCAASGRTFTNYAMGWFRQAPGKEREFVAAIAYATHFADSVKGR
FTISRGNAKNTVYLQMNSLKPEDTAVYYCAADLSLSKMVSKITSDMDYWGKGTLVTVSS
IL6R107A1-GS9-IL6R103A4, SEQ ID NO: 828
EVQLVESGGGLVQAGGSLNLSCNASGDIGSINAMGWYRQAPGQQREWVAVITDTDSTIYPDSV
KGRFAISRDGAKNTVHLRMSSLKPEDTAVYYCNAYQAGWGDYWGQGTQVTVSSGGGGSGGGSE
VQLVESGGGLVQPGGSLRLSCAASGSIFSINTMGWYRQVPGKQRELVATVRSGSITNYADSVQ
DRFTITRDIDENTVYLQMNSLKPEDTAVYYCLTRASVPGRGYQDYWGQGTQVTVSS
IL6R107A9-GS9-IL6R101H6, SEQ ID NO: 829
EVQLVESGGGLVQAGGSLRLSCAASGGIFSDMFMGWFRQAPGKSRESVARISPSGNTFYQDSV
RGRFTISTDNAKNTVYLQMNNLKPEDTAVYYCAANVGVTGSYEYWGQGTQVTVSSGGGGSGGG
SEVQLVESGGGLVQAGGSLRLSCTASGRTFTDYDMGWFRQAPGKEREVVAIIDTNGDNTLTVG
SVKGRFAISSDNAKNTVYLQMNSLLPEDTAVYTCAAGAWSALRRSVANYWGQGTQVTVSS
IL6R107A9-GS9-IL6R104E4, SEQ ID NO: 830
EVQLVESGGGLVQAGGSLRLSCAASGGIFSDMFMGWFRQAPGKSRESVARISPSGNTFYQDSV
RGRFTISTDNAKNTVYLQMNNLKPEDTAVYYCAANVGVTGSYEYWGQGTQVTVSSGGGGSGGG
SEVQLVESGGGTVQAGGSLKLSCAASGRTFTNYAMGWFRQAPGKEREFVAAIAYATHFADSVK
GRFTISRGNAKNTVYLQMNSLKPEDTAVYYCAADLSLSKMVSKITSDMDYWGKGTLVTVSS
IL6R107A9-GS9-IL6R103A4, SEQ ID NO: 831
EVQLVESGGGLVQAGGSLRLSCAASGGIFSDMFMGWFRQAPGKSRESVARISPSGNTFYQDSV
RGRFTISTDNAKNTVYLQMNNLKPEDTAVYYCAANVGVTGSYEYWGQGTQVTVSSGGGGSGGG
SEVQLVESGGGLVQPGGSLRLSCAASGSIFSINTMGWYRQVPGKQRELVATVRSGSITNYADS
VQDRFTITRDIDENTVYLQMNSLKPEDTAVYYCLTRASVPGRGYQDYWGQGTQVTVSS
IL6R120A5-GS9-IL6R101H6, SEQ ID NO: 832
EVQLVESGGGLVQAGGSLSLSCATSGRTISDDTMAWFRQAPGKEREFVAIITFNGARTHYSDS
VRDRFTISRDNAKNTVYLQMNSLKSEDTAVYYCAASTKYYSSTYNYIHPAFYDIWGQGTQVTV
SSGGGGSGGGSEVQLVESGGGLVQAGGSLRLSCTASGRTFTDYDMGWFRQAPGKEREVVAIID
TNGDNTLTVGSVKGRFAISSDNAKNTVYLQMNSLLPEDTAVYTCAAGAWSALRRSVANYWGQG
TQVTVSS
IL6R120A5-GS35-IL6R104E4, SEQ ID NO: 833
EVQLVESGGGLVQAGGSLSLSCATSGRTISDDTMAWFRQAPGKEREFVAIITFNGARTHYSDS
VRDRFTISRDNAKNTVYLQMNSLKSEDTAVYYCAASTKYYSSTYNYIHPAFYDIWGQGTQVIV
SSGGGGSGGGGSGGGGSGGGGSGGGGSGGGGSGGGGSEVQLVESGGGTVQAGGSLKLSCAASG
RTFTNYAMGWFRQAPGKEREFVAAIAYATHFADSVKGRFTISRGNAKNTVYLQMNSLKPEDTA
VYYCAADLSLSKMVSKITSDMDYWGKGTLVTVSS
IL6R120A5-GS35-IL6R103A4, SEQ ID NO: 834
EVQLVESGGGLVQAGGSLSLSCATSGRTISDDTMAWFRQAPGKEREFVAIITFNGARTHYSDS
VRDRFTISRDNAKNTVYLQMNSLKSEDTAVYYCAASTKYYSSTYNYIHPAFYDIWGQGTQVTV
SSGGGGSGGGGSGGGGSGGGGSGGGGSGGGGSGGGGSEVQLVESGGGLVQPGGSLRLSCAASG
SIFSINTMGWYRQVPGKQRELVATVRSGSITNYADSVQDRFTITRDIDENTVYLQMNSLKPED
TAVYYCLTRASVPGRGYQDYWGQGTQVTVSS
IL6R120G6-GS35-IL6R101H6, SEQ ID NO: 835
EVQLVESGGDLVQTGGSLRLSCAASGITVSDRAMGWYRQAPGKQREMVAGVSRGGMTSYADSV
KGRLTISRDNAKNSVYLQMNSLNPEDTAVYYCSAYYRYGSSVPQYWGQGTQVTVSSGGGGSGG
GGSGGGGSGGGGSGGGGSGGGGSGGGGSEVQLVESGGGLVQAGGSLRLSCTASGRTFTDYDMG
WFRQAPGKEREVVAIIDTNGDNTLTVGSVKGRFAISSDNAKNTVYLQMNSLLPEDTAVYTCAA
GAWSALRRSVANYWGQGTQVTVSS
IL6R120G6-GS35-IL6R104E4, SEQ ID NO: 836
EVQLVESGGDLVQTGGSLRLSCAASGITVSDRAMGWYRQAPGKQREMVAGVSRGGMTSYADSV
KGRLTISRDNAKNSVYLQMNSLNPEDTAVYYCSAYYRYGSSVPQYWGQGTQVTVSSGGGGSGG
GGSGGGGSGGGGSGGGGSGGGGSGGGGSEVQLVESGGGLVQAGGSLKLSCAASGRTFTNYAMG
WFRQAPGKEREFVAAIAYATHFADSVKGRFTISRGNAKNTVYLQMNSLKPEDTAVYYCAADLS
LSKMVSKITSDMDYWGKGTLVTVSS
IL6R120G6-GS35-IL6R103A4, SEQ ID NO: 837
EVQLVESGGDLVQTGGSLRLSCAASGITVSDRAMGWYRQAPGKQREMVAGVSRGGMTSYADSV
KGRLTISRDNAKNSVYLQMNSLNPEDTAVYYCSAYYRYGSSVPQYWGQGTQVTVSSGGGGSGG
GGSGGGGSGGGGSGGGGSGGGGSGGGGSEVQLVESGGGLVQPGGSLRLSCAASGSIFSINTMG
WYRQVPGKQRELVATVRSGSITNYADSVQDRFTITRDIDENTVYLQMNSLKPEDTAVYYCLTR
ASVPGRGYQDYWGQGTQVTVSS
IL6R105E1-GS35-IL6R101H6, SEQ ID NO: 838
EVQLVESGGGLVQAGGSLRLSCAASGSIFSIKAMGWYRQAPGKQRELVARITSGGSTYYADSV
KGRFTISRDNAKNTVYLQMNSLKPEDTAVFYCNAIVTDSDYDLGNDYWGQGTQVTVSSGGGGS
GGGGSGGGGSGGGGSGGGGSGGGGSGGGGSEVQLVESGGGLVQAGGSLRLSCTASGRTFTDYD
MGWFRQAPGKEREVVAIIDTNGDNTLTVGSVKGRFAISSDNAKNTVYLQMNSLLPEDTAVYTC
AAGAWSALRRSVANYWGQGTQVTVSS
IL6R105E1-GS35-IL6R104E4, SEQ ID NO: 839
EVQLVESGGGLVQAGGSLRLSCAASGSIFSIKAMGWYRQAPGKQRELVARITSGGSTYYADSV
KGRFTISRDNAKNTVYLQMNSLKPEDTAVFYCNAIVTDSDYDLGNDYWGQGTQVTVSSGGGGS
GGGGSGGGGSGGGGSGGGGSGGGGSGGGGSEVQLVESGGGTVQAGGSLKLSCAASGRTFTNYA
MGWFRQAPGKEREFVAAIAYATHFADSVKGRFTISRGNAKNTVYLQMNSLKPEDTAVYYGAAD
LSLSKMVSKITSDMDYWGKGTLVTVSS
IL6R105E1-GS35-IL6R103A4, SEQ ID NO: 840
EVQLVESGGGLVQAGGSLRLSCAASGSIFSIKAMGWYRQAPGKQRELVARITSGGSTYYADSV
KGRFTISRDNAKNTVYLQMNSLKPEDTAVFYCNAIVTDSDYDLGNDYWGQGTQVTVSSGGGGS
GGGGSGGGGSGGGGSGGGGSGGGGSGGGGSEVQLVESGGGLVQPGGSLRLSCAASGSIFSINT
MGWYRQVPGKQRELVATVRSGSITNYADSVQDRFTITRDIDENTVYLQMNSLKPEDTAVYYCL
TRASVPGRGYQDYWGQGTQVTVSS
IL6R103C4-GS35-IL6R101H6, SEQ ID NO: 841
EVQLVESGGGLVEAGGSLRLSCAAAGRTLSSYSMAWFRQAPGKEREFVAIIRGNPSRTYHSDS
VKGRFTASRDNAKNTVYLQMNRLEPEDTAVYYCAADPPPFASDYSAPQSYDYWGQGTQVTVSS
GGGGSGGGGSGGGGSGGGGSGGGGSGGGGSGGGGSEVQLVESGGGLVQAGGSLRLSCTASGRT
FTDYDMGWFRQAPGKEREVVAIIDTNGDNTLTVGSVKGRFAISSDNAKNTVYLQMNSLLPEDT
AVYTCAAGAWSALRRSVANYWGQGTQVTVSS
IL6R103C4-GS35-IL6R104E4, SEQ ID NO: 842
EVQLVESGGGLVEAGGSLRLSCAAAGRTLSSYSMAWFRQAPGKEREFVAIIRGNPSRTYHSDS
VKGRFTASRDNAKNTVYLQMNRLEPEDTAVYYCAADPPPFASDYSAPQSYDYWGQGTQVTVSS
GGGGSGGGGSGGGGSGGGGSGGGGSGGGGSGGGGSEVQLVESGGGTVQAGGSLKLSCAASGRT
FTNYAMGWFRQAPGKEREFVAAIAYATHFADSVKGRFTISRGNAKNTVYLQMNSLKPEDTAVY
YCAADLSLSKMVSKITSDMDYWGKGTLVTVSS
IL6R103H9-GS35-IL6R101H6, SEQ ID NO: 843
EVQLVESGGGLVQPGGSLRLSCAASKSIFDINAMYWHRQAPGKQRESVASITSGGMRNYADSV
KDRFTISKDNAKNTVYLQMNGLKPDDTAVYYCGLGRYEGGVWRDYWGQGTQVTVSSGGGGSGG
GGSGGGGSGGGGSGGGGSGGGGSGGGGSEVQLVESGGGLVQAGGSLRLSCTASGRTFTDYDMG
WFRQAPGKEREVVAIIDTNGDNTLTVGSVKGRFAISSDNAKNTVYLQMNSLLPEDTAVYTCAA
GAWSALRRSVANYWGQGTQVTVSS
IL6R103H9-GS35-IL6R104E4, SEQ ID NO: 844
EVQLVESGGGLVQPGGSLRLSCAASKSIFDINAMYWHRQAPGKQRESVASITSGGMRNYADSV
KDRFTISKDNAKNTVYLQMNGLKPDDTAVYYCGLGRYEGGVWRDYWGQGTQVTVSSGGGGSGG
GGSGGGGSGGGGSGGGGSGGGGSGGGGSEVQLVESGGGTVQAGGSLKLSCAASGRTFTNYAMG
WFRQAPGKEREFVAAIAYATHFADSVKGRFTISRGNAKNTVYLQMNSLKPEDTAVYYCAADLS
LSKMVSKITSDMDYWGKGTLVTVSS
IL6R103H9-GS35-IL6R103A4, SEQ ID NO: 845
EVQLVESGGGLVQPGGSLRLSCAASKSIFDINAMYWHRQAPGKQRESVASITSGGMRNYADSV
KDRFTISKDNAKNTVYLQMNGLKPDDTAVYYCGLGRYEGGVWRDYWGQGTQVTVSSGGGGSGG
GGSGGGGSGGGGSGGGGSGGGGSGGGGSEVQLVESGGGLVQPGGSLRLSCAASGSIFSINTMG
WYRQVPGKQRELVATVRSGSITNYADSVQDRFTITRDIDENTVYLQMNSLKPEDTAVYYCLTR
ASVPGRGYQDYWGQGTQVTVSS
IL6R107A1-GS35-IL6R101H6, SEQ ID NO: 846
EVQLVESGGGLVQAGGSLNLSCNASGDIGSINAMGWYRQAPGQQREWVAVITDTDSTIYPDSV
KGRFAISRDGAKNTVHLRMSSLKPEDTAVYYCNAYQAGWGDYWGQGTQVTVSSGGGGSGGGGS
GGGGSGGGGSGGGGSGGGGSGGGGSEVQLVESGGGLVQAGGSLRLSCTASGRTFTDYDMGWFR
QAPGKEREVVAIIDTNGDNTLTVGSVKGRFAISSDNAKNTVYLQMNSLLPEDTAVYTCAAGAW
SALRRSVANYWGQGTQVTVSS
IL6R107A1-GS35-IL6R104E4, SEQ ID NO: 847
EVQLVESGGGLVQAGGSLNLSCNASGDIGSINAMGWYRQAPGQQREWVAVITDTDSTIYPDSV
KGRFAISRDGAKNTVHLRMSSLKPEDTAVYYCNAYQAGWGDYWGQGTQVTVSSGGGGSGGGGS
GGGGSGGGGSGGGGSGGGGSGGGGSEVQLVESGGGTVQAGGSLKLSCAASGRTFTNYAMGWFR
QAPGKEREFVAAIAYATHFADSVKGRFTISRGNAKNTVYLQMNSLKPEDTAVYYCAADLSLSK
MVSKITSDMDYWGKGTLVTVSS
IL6R107A1-GS35-IL6R103A4, SEQ ID NO: 848
EVQLVESGGGLVQAGGSLNLSCNASGDIGSINAMGWYRQAPGQQREWVAVITDTDSTIYPDSV
KGRFAISRDGAKNTVHLRMSSLKPEDTAVYYCNAYQAGWGDYWGQGTQVTVSSGGGGSGGGGS
GGGGSGGGGSGGGGSGGGGSGGGGSEVQLVESGGGLVQPGGSLRLSCAASGSIFSINTMGWYR
QVPGKQRELVATVRSGSITNYADSVQDRETITRDIDENTVYLQMNSLKPEDTAVYYCLTRASV
PGRGYQDYWGQGTQVTVSS
IL6R107A9-GS35-IL6R101H6, SEQ ID NO: 849
EVQLVESGGGLVQAGGSLRLSCAASGGIFSDMFMGWFRQAPGKSRESVARISPSGNTFYQDSV
RGRFTISTDNAKNTVYLQMNNLKPEDTAVYYCAANVGVTGSYEYWGQGTQVTVSSGGGGSGGG
GSGGGGSGGGGSGGGGSGGGGSGGGGSEVQLVESGGGLVQAGGSLRLSCTASGRTFTDYDMGW
FRQAPGKEREVVAIIDTNGDNTLTVGSVKGRFAISSDNAKNTVYLQMNSLLPEDTAVYTCAAG
AWSALRRSVANYWGQGTQVTVSS
IL6R107A9-GS35-IL6R104E4, SEQ ID NO: 850
EVQLVESGGGLVQAGGSLRLSCAASGGIFSDMFMGWFRQAPGKSRESVARISPSGNTFYQDSV
RGRFTISTDNAKNTVYLQMNNLKPEDTAVYYCAANVGVTGSYEYWGQGTQVTVSSGGGGSGGG
GSGGGGSGGGGSGGGGSGGGGSGGGGSEVQLVESGGGTVQAGGSLKLSCAASGRTFTNYAMGW
FRQAPGKEREFVAAIAYATHFADSVKGRFTISRGNAKNTVYLQMNSLKPEDTAVYYCAADLSL
SKMVSKITSDMDYWGKGTLVTVSS
IL6R107A9-GS35-IL6R103A4, SEQ ID NO: 851
EVQLVESGGGLVQAGGSLRLSCAASGGIFSDMFMGWFRQAPGKSRESVARISPSGNTFYQDSV
RGRFTISTDNAKNTVYLQMNNLKPEDTAVYYCAANVGVTGSYEYWGQGTQVTVSSGGGGSGGG
GSGGGGSGGGGSGGGGSGGGGSGGGGSEVQLVESGGGLVQPGGSLRLSCAASGSIFSINTMGW
YRQVPGKQRELVATVRSGSITNYADSVQDRFTITRDIDENTVYLQMNSLKPEDTAVYYCLTRA
SVPGRGYQDYWGQGTQVTVSS
IL6R101H6-GS35-IL6R105E1, SEQ ID NO: 946
EVQLVESGGGLVQAGGSLRLSCTASGRTFTDYDMGWFRQAPGKEREVVAIIDTNGDNTLTVGS
VKGRFAISSDNAKNTVYLQMNSLLPEDTAVYTCAAGAWSALRRSVANYWGQGTQVTVSSGGGG
SGGGGSGGGGSGGGGSGGGGSGGGGSGGGGSEVQLVESGGGLVQAGGSLRLSCAASGSIFSIK
AMGWYRQAPGKQRELVARITSGGSTYYADSVKGRFTISRDNAKNTVYLQMNSLKPEDTAVFYC
NAIVTDSDYDLGNDYWGQGTQVTVSS

TABLE A-5
Protein sequences of biparatopic anti-IL-6R Nanobodies
(IL6R-IL6 inhibiting block combined with a non-inhibiting,
IL6R binding block but not hybrid IL6R binding block)

IL6R120A5-GS9-IL6R100D11, SEQ ID NO: 852
EVQLVESGGGLVQAGGSLSLSCATSGRTISDDTMAWFRQAPGKEREFVAIITFNGART
HYSDSVRDRFTISRDNAKNTVYLQMNSLKSEDTAVYYCAASTKYYSSTYNYIHPAFYD
IWGQGTQVTVSSGGGGSGGGSEVQLVESGGGLVQAGDSLRLSCLASGRSFKDDAMGWF
RQAPGKEREFVSGIDWRGNIVDAESVKGRFTISRENAKNTLYLQMNHLKPEDTAVYYC
AASSVFSDLRYRKNPKYWGQGTQVTVSS
IL6R120A5-GS9-IL6R101B12, SEQ ID NO: 853
EVQLVESGGGLVQAGGSLSLSCATSGRTISDDTMAWFRQAPGKEREFVAIITFNGART
HYSDSVRDRFTISRDNAKNTVYLQMNSLKSEDTAVYYCAASTKYYSSTYNYIHPAFYD
IWGQGTQVTVSSGGGGSGGGSEVQLVESGGGLVQPGGSLRLSCAASGVTLDYYAIGWF
RQAPGKEREGVSSISSNDGSTFYADSVKGRFTISRDKAKNTVYLQMNSLKPEDTAVYY
CAATYLTAQAVGVPVAYYEFDYWGQGTQVTVSS
IL6R120A5-GS9-IL6R107H2, SEQ ID NO: 854
EVQLVESGGGLVQAGGSLSLSCATSGRTISDDTMAWFRQAPGKEREFVAIITFNGART
HYSDSVRDRFTISRDNAKNTVYLQMNSLKSEDTAVYYCAASTKYYSSTYNYIHPAFYD
IWGQGTQVTVSSGGGGSGGGSKVQLVESGGGLVQPGGSLRLSCAASGFTFSSYAMSWV
RRAPGKGLEWVSAINSDGTGSSYAPFVTGRFTASRDNAKNTLYLQMNSLKPEDTAVYY
CTNSNRYDYADFSAVRGQGTQVTVSS
IL6R120A5-GS9-IL6R103A5, SEQ ID NO: 855
EVQLVESGGGLVQAGGSLSLSCATSGRTISDDTMAWFRQAPGKEREFVAIITFNGART
HYSDSVRDRFTISRDNAKNTVYLQMNSLKSEDTAVYYCAASTKYYSSTYNYIHPAFYD
IWGQGTQVTVSSGGGGSGGGSEVQLVESGGGLVQAGDSLRLSCVASGLPFSTLHMGWF
RQAPGKEHESVSAISSDGGSEYYAGSVKGRFTISRDNAKNTVYLQMNSLKPEDTAVYY
CAADPRRIGANIKYSDYWGQGTQVTVSS
IL6R120A5-GS9-IL6R103E2, SEQ ID NO: 856
EVQLVESGGGLVQAGGSLSLSCATSGRTISDDTMAWFRQAPGKEREFVAIITFNGART
HYSDSVRDRFTISRDNAKNTVYLQMNSLKSEDTAVYYCAASTKYYSSTYNYIHPAFYD
IWGQGTQVTVSSGGGGSGGGSEVQLVESGGGLVQPGGSLRLSCAASGSTFSINMMAWY
CQAPGKQRELVASISSGGGINYADSVKGRFTISRDYAENSVDLQMNSLKPEDTAVYYC
NARGTYLNGDHYSTNYNSWGQGTQVTVSS
IL6R120G6-GS9-IL6R100D11, SEQ ID NO: 857
EVQLVESGGDLVQTGGSLRLSCAASGITVSDRAMGWYRQAPGKQREMVAGVSRGGMTS
YADSVKGRLTISRDNAKNSVYLQMNSLNPEDTAVYYCSAYYRYGSSVPQYWGQGTQVT
VSSGGGGSGGGSEVQLVESGGGLVQAGDSLRLSCLASGRSFKDDAMGWFRQAPGKERE
FVSGIDWRGNIVDAESVKGRFTISRENAKNTLYLQMNHLKPEDTAVYYCAASSVFSDL
RYRKNPKYWGQGTQVTVSS
IL6R120G6-GS9-IL6R101B12, SEQ ID NO: 858
EVQLVESGGDLVQTGGSLRLSCAASGITVSDRAMGWYRQAPGKQREMVAGVSRGGMTS
YADSVKGRLTISRDNAKNSVYLQMNSLNPEDTAVYYCSAYYRYGSSVPQYWGQGTQVT
VSSGGGGSGGGSEVQLVESGGGLVQPGGSLRLSCAASGVTLDYYAIGWFRQAPGKERE
GVSSISSNDGSTFYADSVKGRFTISRDKAKNTVYLQMNSLKPEDTAVYYCAATYLTAQ
AVGVPVAYYEFDYWGQGTQVTVSS
IL6R120G6-GS9-IL6R107H2, SEQ ID NO: 859
EVQLVESGGDLVQTGGSLRLSCAASGITVSDRAMGWYRQAPGKQREMVAGVSRGGMTS
YADSVKGRLTISRDNAKNSVYLQMNSLNPEDTAVYYCSAYYRYGSSVPQYWGQGTQVT
VSSGGGGSGGGSKVQLVESGGGLVQPGGSLRLSCAASGFTFSSYAMSWVRRAPGKGLE
WVSAINSDGTGSSYAPFVTGRFTASRDNAKNTLYLQMNSLKPEDTAVYYCTNSNRYDY
ADFSAVRGQGTQVTVSS
IL6R120G6-GS9-IL6R103A5, SEQ ID NO: 860
EVQLVESGGDLVQTGGSLRLSCAASGITVSDRAMGWYRQAPGKQREMVAGVSRGGMTS
YADSVKGRLTISRDNAKNSVYLQMNSLNPEDTAVYYCSAYYRYGSSVPQYWGQGTQVT
VSSGGGGSGGGSEVQLVESGGGLVQAGDSLRLSCVASGLPFSTLHMGWFRQAPGKEHE
SVSAISSDGGSEYYAGSVKGRFTISRDNAKNTVYLQMNSLKPEDTAVYYCAADPRRIG
ANIKYSDYWGQGTQVTVSS
IL6R120G6-GS9-IL6R103B2, SEQ ID NO: 861
EVQLVESGGDLVQTGGSLRLSCAASGITVSDRAMGWYRQAPGKQREMVAGVSRGGMTS
YADSVKGRLTISRDNAKNSVYLQMNSLNPEDTAVYYCSAYYRYGSSVPQYWGQGTQVT
VSSGGGGSGGGSEVQLVESGGGLVQPGGSLRLSCAASGSTFSINMMAWYCQAPGKQRE
LVASISSGGGINYADSVKGRFTISRDYAENSVDLQMNSLKPEDTAVYYCNARGTYLNG
DHYSTNYNSWGQGTQVTVSS
IL6R105E1-GS9-IL6R100D11, SEQ ID NO: 862
EVQLVESGGGLVQAGGSLRLSCAASGSIFSIKAMGWYRQAPGKQRELVARITSGGSTY
YADSVKGRFTISRDNAKNTVYLQMNSLKPEDTAVFYCNAIVTDSDYDLGNDYWGQGTQ
VTVSSGGGGSGGGSEVQLVESGGGLVQAGDSLRLSCLASGRSFKDDAMGWFRQAPGKE
REFVSGIDWRGNIVDAESVKGRFTISRENAKNTLYLQMNHLKPEDTAVYYCAASSVFS
DLRYRKNPKYWGQGTQVTVSS
IL6R105E1-GS9-IL6R101B12, SEQ ID NO: 863
EVQLVESGGGLVQAGGSLRLSCAASGSIFSIKAMGWYRQAPGKQRELVARITSGGST
YYADSVKGRFTISRDNAKNTVYLQMNSLKPEDTAVFYCNAIVTDSDYDLGNDYWGQG
TQVTVSSGGGGSGGGSEVQLVESGGGLVQPGGSLRLSCAASGVTLDYYAIGWFRQAP
GKEREGVSSISSNDGSTFYADSVKGRFTISRDKAKNTVYLQMNSLKPEDTAVYYCAA
TYLTAQAVGVPVAYYEFDYWGQGTQVTVSS
IL6R105E1-GS9-IL6R107H2, SEQ ID NO: 864
EVQLVESGGGLVQAGGSLRLSCAASGSIFSIKAMGWYRQAPGKQRELVARITSGGST
YYADSVKGRFTISRDNAKNTVYLQMNSLKPEDTAVFYCNAIVTDSDYDLGNDYWGQG
TQVTVSSGGGGSGGGSKVQLVESGGGLVQPGGSLRLSCAASGFTFSSYAMSWVRRAP
GKGLEWVSAINSDGTGSSYAPFVTGRFTASRDNAKNTLYLQMNSLKPEDTAVYYCTN
SNRYDYADFSAVRGQGTQVTVSS
IL6R105E1-GS9-IL6R103A5, SEQ ID NO: 865
EVQLVESGGGLVQAGGSLRLSCAASGSIFSIKAMGWYRQAPGKQRELVARITSGGST
YYADSVKGRFTISRDNAKNTVYLQMNSLKPEDTAVFYCNAIVTDSDYDLGNDYWGQG
TQVTVSSGGGGSGGGSEVQLVESGGGLVQAGDSLRLSCVASGLPFSTLHMGWFRQAP
GKEHESVSAISSDGGSEYYAGSVKGRFTISRDNAKNTVYLQMNSLKPEDTAVYYCAA
DPRRIGANIKYSDYWGQGTQVTVSS
IL6R105E1-GS9-IL6R103B2, SEQ ID NO: 866
EVQLVESGGGLVQAGGSLRLSCAASGSIFSIKAMGWYRQAPGKQRELVARITSGGST
YYADSVKGRFTISRDNAKNTVYLQMNSLKPEDTAVFYCNAIVTDSDYDLGNDYWGQG
TQVTVSSGGGGSGGGSEVQLVESGGGLVQPGGSLRLSCAASGSTFSINMMAWYCQAP
GKQRELVASISSGGGINYADSVKGRFTISRDYAENSVDLQMNSLKPEDTAVYYCNAR
GTYLNGDHYSTNYNSWGQGTQVTVSS
IL6R103C4-GS9-IL6R100D11, SEQ ID NO: 867
EVQLVESGGGLVEAGGSLRLSCAAAGRTLSSYSMAWFRQAPGKEREFVAIIRGNPSR
TYHSDSVKGRFTASRDNAKNTVYLQMNRLEPEDTAVYYDAADPPPFASDYSAPQSYD
YWGQGTQVTVSSGGGGSGGGSEVQLVESGGGLVQAGDSLRLSCLASGRSFKDDAMGW
FRQAPGKEREFVSGIDWRGNIVDAESVKGRFTISRENAKNTLYLQMNHLKPEDTAVY
YCAASSVFSDLRYRKNPKYWGQGTQVTVSS
IL6R103C4-GS9-IL6R101B12, SEQ ID NO: 868
EVQLVESGGGLVEAGGSLRLSCAAAGRTLSSYSMAWFRQAPGKEREFVAIIRGNPSR
TYHSDSVKGRFTASRDNAKNTVYLQMNRLEPEDTAVYYCAADPPPFASDYSAPQSYD
YWGQGTQVTVSSGGGGSGGGSEVQLVESGGGLVQPGGSLRLSCAASGVTLDYYAIGW
FRQAPGKEREGVSSISSNDGSTFYADSVKGRFTISRDKAKNTVYLQMNSLKPEDTAV
YYCAATYLTAQAVGVPVAYYEFDYWGQGTQVTVSS
IL6R103C4-GS9-IL6R107H2, SEQ ID NO: 869
EVQLVESGGGLVEAGGSLRLSCAAAGRTLSSYSMAWFRQAPGKEREFVAIIRGNPSR
TYHSDSVKGRFTASRDNAKNTVYLQMNRLEPEDTAVYYCAADPPPFASDYSAPQSYD
YWGQGTQVTVSSGGGGSGGGSKVQLVESGGGLVQPGGSLRLSCAASGFTFSSYAMSW
VRRAPGKGLEWVSAINSDGTGSSYAPFVTGRFTASRDNAKNTLYLQMNSLKPEDTAV
YYCTNSNRYDYADFSAVRGQGTQVTVSS
IL6R103C4-GS9-IL6R103A5, SEQ ID NO: 870
EVQLVESGGGLVEAGGSLRLSCAAAGRTLSSYSMAWFRQAPGKEREFVAIIRGNPSR
TYHSDSVKGRFTASRDNAKNTVYLQMNRLEPEDTAVYYCAADPPPFASDYSAPQSYD
YWGQGTQVTVSSGGGGSGGGSEVQLVESGGGLVQAGDSLRLSCVASGLPFSTLHMGW
FRQAPGKEHESVSAISSDGGSEYYAGSVKGRFTISRDNAKNTVYLQMNSLKPEDTAV
YYCAADPRRIGANIKYSDYWGQGTQVTVSS
IL6R103C4-GS9-IL6R103B2, SEQ ID NO: 871
EVQLVESGGGLVEAGGSLRLSCAAAGRTLSSYSMAWFRQAPGKEREFVAIIRGNPSR
TYHSDSVKGRFTASRDNAKNTVYLQMNRLEPEDTAVYYCAADPPPFASDYSAPQSYD
YWGQGTQVTVSSGGGGSGGGSEVQLVESGGGLVQPGGSLRLSCAASGSTFSINMMAW
YCQAPGKQRELVASISSGGGINYADSVKGRFTISRDYAENSVDLQMNSLKPEDTAVY
YCNARGTYLNGDHYSTNYNSWGQGTQVTVSS
IL6R103H9-GS9-IL6R100D11, SEQ ID NO: 872
EVQLVESGGGLVQPGGSLRLSCAASKSIFDINAMYWHRQAPGKQRESVASITSGGMR
NYADSVKDRFTISKDNAKNTVYLQMNGLKPDDTAVYYCGLGRYEGGVWRDYWGQGTQ
VTVSSGGGGSGGGSEVQLVESGGGLVQAGDSLRLSCLASGRSFKDDAMGWFRQAPGK
EREFVSGIDWRGNIVDAESVKGRFTISRENAKNTLYLQMNHLKPEDTAVYYCAASSV
FSDLRYRKNPKYWGQGTQVTVSS
IL6R103H9-GS9-IL6R101B12, SEQ ID NO: 873
EVQLVESGGGLVQPGGSLRLSCAASKSIFDINAMYWHRQAPGKQRESVASITSGGMR
NYADSVKDRFTISKQNAKNTVYLQMNGLKPDDTAVYYCGLGRYEGGVWRDYWGQGTQ
VTVSSGGGGSGGGSEVQLVESGGGLVQPGGSLRLSCAASGVTLDYYAIGWFRQAPGK
EREGVSSISSNDGSTFYADSVKGRFTISRDKAKNTVYLQMNSLKPEDTAVYYCAATY
LTAQAVGVPVAYYEFDYWGQGTQVTVSS
IL6R103H9-GS9-IL6R107H2, SEQ ID NO: 874
EVQLVESGGGLVQPGGSLRLSCAASKSIFDINAMYWHRQAPGKQRESVASITSGGMR
NYADSVKDRFTISKDNAKNTVYLQMNGLKPDDTAVYYCGLGRYEGGVWRDYWGQGTQ
VTVSSGGGGSGGGSKVQLVESGGGLVQPGGSLRLSCAASGFTFSSYAMSWVRRAPGK
GLEWVSAINSDGTGSSYAPFVTGRFTASRDNAKNTLYLQMNSLKPEDTAVYYCTNSN
RYDYADFSAVRGQGTQVTVSS
IL6R103E9-GS9-IL6R103A5, SEQ ID NO: 875
EVQLVESGGGLVQPGGSLRLSCAASKSIFDINAMYWHRQAPGKQRESVASITSGGMR
NYADSVKDRFTISKDNAKNTVYLQMNGLKPDDTAVYYCGLGRYEGGVWRDYWGQGTQ
VTVSSGGGGSGGGSEVQLVESGGGLVQAGDSLRLSCVASGLPFSTLHMGWFRQAPGK
EHESVSAISSDGGSEYYAGSVKGRFTISRDNAKNTVYLQMNSLKPEDTAVYYCAADP
RRIGANIKYSDYWGQGTQVTVSS
IL6R103119-GS9-1L6R103B2, SEQ ID NO: 876
EVQLVESGGGLVQPGGSLRLSCAASKSIFDINAMYWHRQAPGKQRESVASITSGGMR
NYADSVKDRFTISKDNAKNTVYLQMNGLKPDDTAVYYCGLGRYEGGVWRDYWGQGTQ
VTVSSGGGGSGGGSEVQLVESGGGLVQPGGSLRLSCAASGSTFSINMMAWYCQAPGK
QRELVASISSGGGINYADSVKGRFTISRDYAENSVDLQMNSLKPEDTAVYYCNARGT
YLNGDHYSTNYNSWGQGTQVTVSS
IL6R107A1-GS9-IL6R100D11, SEQ ID NO: 877
EVQLVESGGGLVQAGGSLNLSCNASGDIGSINAMGWYRQAPGQQREWVAVITDTDST
IYPDSVKGRFAISRDGAKNTVHLRMSSLKPEDTAVYYCNAYQAGWGDYWGQGTQVTV
SEGGGGSGGGSEVQLVESGGGLVQAGDSLRLSCLASGRSFKDDAMGWFRQAPGKERE
FVSGIDWRGNIVDAESVKGRFTISRENAKNTLYLQMNHLKPEDTAVYYCAASSVFSD
LRYRKNPKYWGQGTQVTVSS
IL6R107A1-GS9-IL6R101B12, SEQ ID NO: 878
EVQLVESGGGLVQAGGSLNLSCNASGDIGSINAMGWYRQAPGQQREWVAVITDTDST
IYPDSVKGRFAISRDGAKNTVHLRMSSLKPEDTAVYYCNAYQAGWGDYWGQGTQVTV
SSGGGGSGGGSEVQLVESGGGLVQPGGSLRLSCAASGVTLDYYAIGWFRQAPG
KEREGVSSISSNDGSTFYADSVKGRFTISRDKAKNTVYLQMNSLKPEDTAVYYCAAT
YLTAQAVGVPVAYYEFDYWGQGTQVTVSS
IL6R107A1-GS9-IL6R107H2, SEQ ID NO: 879
EVQLVESGGGLVQAGGSLNLSCNASGDIGSINAMGWYRQAPGQQREWVAVITDTDST
IYPDSVKGRFAISRDGAKNTVHLRMSSLKPEDTAVYYQNAYQAGWGDYWGQGTQVTV
SSGGGGSGGGSKVQLVESGGGLVQPGGSLRLSCAASGFTFSSYAMSWVRRAPGKGLE
WVSAINSDGTGSSYAPFVTGRFTASRDNAKNTLYLQMNSLKPEDTAVYYCTNSNRYD
YADFSAVRGQGTQVTVSS
IL6R107A1-GS9-IL6R103A5, SEQ ID NO: 880
EVQLVESGGGLVQAGGSLNLSCNASGDIGSINAMGWYRQAPGQQREWVAVITDTDST
IYPDSVKGRFAISRDGAKNTVHLRMSSLKPEDTAVYYCNAYQAGWGDYWGQGTQVTV
SSGGGGSGGGSEVQLVESGGGLVQAGDSLRLSCVASGLPFSTLHMGWFRQAPG
KEHESVSAISSDGGSEYYAGSVKGRFTISRDNAKNTVYLQMNSLKPEDTAVYYCAAD
PRRIGANIKYSDYWGQGTQVTVSS
IL6R107A1-GS9-IL6R103B2, SEQ ID NO: 881
EVQLVESGGGLVQAGGSLNLSCNASGDIGSINAMGWYRQAPGQQREWVAVITDTDST
IYPDSVKGRFAISRDGAKNTVHLRMSSLKPEDTAVYYCNAYQAGWGDYWGQGTQVTV
SSGGGGSGGGSEVQLVESGGGLVQPGGSLRLSCAASGSTFSINMMAWYCQAPGKQRE
LVASISSGGGINYADSVKGRFTISRDYAENSVDLQMNSLKPEDTAVYYCNARGTYLN
GDHYSTNYNSWGQGTQVTVSS
IL6R107A9-GS9-IL6R100D11, SEQ ID NO: 882
EVQLVESGGGLVQAGGSLRLSCAASGGIFSDMFMGWFRQAPGKSRESVARISPSGNT
FYQDSVRGRFTISTDNAKNTVYLQMNNLKPEDTAVYYCAANVGVTGSYEYWGQGTQV
TVSSGGGGSGGGSEVQLVESGGGLVQAGDSLRLSCLASGRSFKDDAMGWFRQAPGKE
REFVSGIDWRGNIVDAESVKGRFTISRENAKNTLYLQMNHLKPEDTAVYYCAASSVF
SDLRYRKNPKYWGQGTQVTVSS
IL6R107A9-GS9-IL6R101B12, SEQ ID NO: 883
EVQLVESGGGLVQAGGSLRLSCAASGGIFSDMFMGWFRQAPGKSRESVARISPSGNT
FYQDSVRGRFTISTDNAKNTVYLQMNNLKPEDTAVYYCAANVGVTGSYEYWGQGTQV
TVSSGGGGSGGGSEVQLVESGGGLVQPGGSLRLSCAASGVTLDYYAIGWFRQAPGKE
REGVSSISSNDGSTFYADSVKGRFTISRDKAKNTVYLQMNSLKPEDTAVYYCAATYL
TAQAVGVPVAYYEFDYWGQGTQVTVSS
IL6R107A9-GS9-IL6R107H2, SEQ ID NO: 884
EVQLVESGGGLVQAGGSLRLSCAASGGIFSDMFMGWFRQAPGKSRESVARISPSGNT
FYQDSVRGRFTISTDNAKNTVYLQMNNLKPEDTAVYYCAANVGVTGSYEYWGQGTQV
TVSSGGGGSGGGSKVQLVESGGGLVQPGGSLRLSCAASGFTFSSYAMSWVRRAPGKG
LEWVSAINSDGTGSSYAPFVTGRFTASRDNAKNTLYLQMNSLKPEDTAVYYCTNSNR
YDYADFSAVRGQGTQVTVSS
IL6R107A9-GS9-IL6R103A5, SEQ ID NO: 885
EVQLVESGGGLVQAGGSLRLSCAASGGIFSDMFMGWFRQAPGKSRESVARISPSGNT
FYQDSVRGRFTISTDNAKNTVYLQMNNLKPEDTAVYYCAANVGVTGSYEYWGQGTQV
TVSSGGGGSGGGSEVQLVESGGGLVQAGDSLRLSCVASGLPFSTLHMGWFRQAPGKE
HESVSAISSDGGSEYYAGSVKGRFTISRDNAKNTVYLQMNSLKPEDTAVYYCAADPR
RIGANIKYSDYWGQGTQVTVSS
IL6R107A9-GS9-IL6R103B2, SEQ ID NO: 886
EVQLVESGGGLVQAGGSLRLSCAASGGIFSDMFMGWFRQAPGKSRESVARISPSGNT
FYQDSVRGRFTISTDNAKNTVYLQMNNLKPEDTAVYYCAANVGVTGSYEYWGQGTQV
TVSSGGGGSGGGSEVQLVESGGGLVQPGGSLRLSCAASGSTFSINMMAWYCQAPGKQ
RELVASISSGGGINYADSVKGRFTISRDYAENSVDLQMNSLKPEDTAVYYCNARGTY
LNGDHYSTNYNSWGQGTQVTVSS
IL6R120A5-GS35-IL6R100D11, SEQ ID NO: 887
EVQLVESGGGLVQAGGSLSLSCATSGRTISDDTMAWFRQAPGKEREFVAIITFNGAR
THYSDSVRDRFTISRDNAKNTVYLQMNSLKSEDTAVYYCAASTKYYSSTYNYIHPAF
YDIWGQGTQVTVSSGGGGSGGGGSGGGGSGGGGSGGGGSGGGGSGGGGSEVQLVESG
GGLVQAGDSLRLSCLASGRSFKDDAMGWFRQAPGKEREFVSGIDWRGNIVDAESVKG
RFTISRENAKNTLYLQMNHLKPEDTAVYYCAASSVFSDLRYRKNPKYWGQGTQVTVSS
IL6R120A5-GS35-IL6R101B12, SEQ ID NO: 888
EVQLVESGGQLVQAGGSLSLSCATSGRTISDDTMAWFRQAPGKEREFVAIITFNGAR
THYSDSVRDRFTISRDNAKNTVYLQMNSLKSEDTAVYYCAASTKYYSSTYNYIHPAF
YDIWGQGTQVTVSSGGGGSGGGGSGGGGSGGGGSGGGGSGGGGSGGGGSEVQLVESG
GGLNQPGGSLRLSCAASGVTLDYYAIGWFRQAPGKEREGVSSISSNDGSTFYADSVK
GRFTISRDKAKNTVYLQMNSLKPEDTAVYYCAATYLTAQAVGVPVAYYEFDYWGQGT
QVTVSS
IL6R120A5-GS35-IL6R107H2, SEQ ID NO: 889
EVQLVESGGGLVQAGGSLSLSCATSGRTISDDTMAWFRQAPGKEREFVAIITFNGAR
THYSDSVRDRFTISRDNAKNTVYLQMNSLKSEDTAVYYCAASTKYYSSTYNYIHPAF
YDIWGQGTQVTVSSGGGGSGGGGSGGGGSGGGGSGGGGSGGGGSGGGGSKVQLVESG
GGLVQPGGSLRLSCAASGFTFSSYAMSWVRRAPGKGLEWVSAINSDGTGSSYAPFVT
GRFTASRDNAKNTLYLQMNSLYPEDTAVYYCTNSNRYDYADFSAVRGQGTQVTVSS
IL6R120A5-GS35-IL6R103A5, SEQ ID NO: 890
EVQLVESGGGLVQAGGSLSLSCATSGRTISDDTMAWFRQAPQKEREFVAIITFNGAR
THYSDSVRDRFTISRDNAKNTVYLQMNSLKSEDTAVYYCAASTKYYSSTYNYIHPAF
YDIWGQGTQVTVSSGGGGSGGGGSGGGGSGGGGSGGGGSGGGGSGGGGSEVQLVESG
GGLVQAGDSLRLSCVASGLPFSTLHMGWFRQAPGKEHESVSAISSDGGSEYYAGSVK
GRFTISRDNAKNTVYLQMNSLKPEDTAVYYCAADPRRIGANIKYSDYWGQGTQVTVSS
IL6R120A5-GS35-IL6R103B2, SEQ ID NO: 891
EVQLVESGGGLVQAGGSLSLSCATSGRTISDDTMAWFRQAPGKEREFVAIITFNGAR
THYSDSVRDRFTISRDNAKNTVYLQMNSLKSEDTAVYYCAASTKYYSSTYNYIHPAF
YDIWGQGTQVTVSSGGGGSGGGGSGGGGSGGGGSGGGGSGGGGSGGGGSEVQLVESG
GGLVQPGGSLRLSCAASGSTFSINMMAWYCQAPGKQRELVASISSGGGINYADSVKG
RFTISRDYAENSVDLQMNSLKPEDTAVYYCNARGTYLNGDHYSTNYNSWGQGTQVTVSS
IL6R120G6-GS35-IL6R100D11, SEQ ID NO: 892
EVQLVESGGDLVQTGGSLRLSCAASGITVSDRAMGWYRQAPGKQREMVAGVSRGGMT
SYADSVEGRLTISRDNAKNSVYLQMNSLNPEDTAVYYCSAYYRYGSSVPQYWGQGTQ
VTVSSGGGGSGGGGSGGGGSGGGGSGGGGSGGGGSGGGGSEVQLVESGGGLVQAGDS
LRLSCLASGRSFKDDAMGWFRQAPGKEREFVSGIDWRGNIVDAESVKGRFTISRENA
KNTLYLQMNHLKPEDTAVYYCAASSVFSDLRYRKNPKYWGQGTQVTVSS
IL6R120G6-GS35-IL6R101B12, SEQ ID NO: 893
EVQLVESGGDLVQTGGSLRLSCAASGITVSDRAMGWYRQAPGKQREMVAGVSRGGMT
SYADSVKGRLTISRDNAKNSVYLQMNSLNPEDTAVYYCSAYYRYGSSVPQYWGQGTQ
VTVSSGGGGSGGGGSGGGGSGGGGSGGGGSGGGGSGGGGSEVQLVESGGGLVQPGGS
LRLSCAASGVTLDYYAIGWFRQAPGKEREGVSSISSNDGSTFYADSVKGRFTISRDK
AKNTVYLQMNSLKPEDTAVYYCAATYLTAQAVGVPVAYYEFDYWGQGTQVTVSS
IL6R120G6-GS35-IL6R107H2, SEQ ID NO: 894
EVQLVESGGDLVQTGGSLRLSCAASGITVSDRAMGWYRQAPGKQREMVAGVSRGGMT
SYADSVKGRLTISRDNAKNSVYLQMNSLNPEDTAVYYCSAYYRYGSSVPQYWGQGTQ
VTVSSGGGGSGGGGSGGGGSGGGGSGGGGSGGGGSGGGGSKVQLVESGGGLVQPGGS
LRLSCAASGFTFSSYAMSWVRRAPGKGLEWVSAINSDGTGSSYAPFVTGRFTASRDN
AKNTLYLQMNSLKPEDTAVYYCTNSNRYDYADFSAVRGQGTQVTVSS
IL6R120G6-GS35-IL6R103A5, SEQ ID NO: 895
EVQLVESGGDLVQTGGSLRLSCAASGITVSDRAMGWYRQAPGKQREMVAGVSRGGMT
SYADSVKGRLTISRDNAKNSVYLQMNSLNPEDTAVYYCSAYYRYGSSVPQYWGQGTQ
VTVSSGGGGSGGGGSGGGGSGGGGSGGGGSGGGGSGGGGSEVQLVESGGGLVQAGDS
LRLSCVASGLPFSTLHMGWFRQAPGKEHESVSAISSDGGSEYYAGSVKGRFTISRDN
AKNTVYLQMNSLKPEDTAVYYCAADPRRIGANIKYSDYWGQGTQVTVSS
IL6R120G6-GS35-IL6R103B2, SEQ ID NO: 896
EVQLVESGGDLVQTGGSLRLSCAASGITVSDRAMGWYPQAPGKQREMVAGVSRGGMT
SYADSVKGRLTISRDNAKNSVYLQMNSLNPEDTAVYYCSAYYRYGSSVPQYWGQGTQ
VTVSSGGGGSGGGGSGGGGSGGGGSGGGGSGGGGSGGGGSEVQLVESGGGLVQPGGS
LRLSCAASGSTFSINMMAWYCQAPGKQRELVASISSGGGINYADSVYGRFTISRDYA
ENSVDLQMNSLKPEDTAVYYCNARGTYLNGDHYSTNYNSWGQGTQVTVSS
IL6R105E1-GS35-IL6R100D11, SEQ ID NO: 897
EVQLVESGGGLVQAGGSLRLSCAASGSIFSIKAMGWYRQAPGKQRELVARITSGGST
YYADSVKGRFTISRDNAKNTVYLQMNSLKPEDTAVFYQNAIVTDSDYDLGNDYWGQG
TQVTVSSGGGGSGGGGSGGGGSGGGGSGGGGSGGGGSGGGGSEVQLVESGGGLVQAG
DSLRLSCLASGRSFKDDAMGWFRQAPGKEREFVSGIDWRGNIVDAESVKGRFTISRE
NAKNTLYLQMNHLKPEDTAVYYCAASSVESDLRYRKNPKYWGQGTQVTVSS
IL6R105E1-GS35-IL6R101B12, SEQ ID NO: 898
EVQLVESGGGLVQAGGSLRLSCAASGSIFSIKAMGWYRQAPGKQRELVARITSGGST
YYADSVKGRFTISRDNAKNTVYLQMNSLKPEDTAVFYCNAIVTDSDYDLGNDYWGQG
TQVTVSSGGGGSGGGGSGGGGSGGGGSGGGGSGGGGSGGGGSEVQLVESGGGLVQPG
GSLRLSCAASGVTLDYYAIGWFRQAPGKEREGVSSISSNDGSTFYADSVKGRFTISR
DKAKNTVYLQMNSLKPEDTAWYCAATYLTAQAVGVAVAYYEFDYWGQGTQVTVSS
IL6R105E1-GS35-IL6R107H2, SEQ ID NO: 899
EVQLVESGGGLVQAGGSLRLSCAASGSIFSIKAMGWYRQAPGKQRELVARITSGGST
YYADSVKGRFTISRDNAKNTVYLQMNSLKPEDTAVFYCNAIVTDSDYDLGNDYWGQG
TQVTVSSGGGGSGGGGSGGGGSGGGGSGGGGSGGGGSGGGGSKVQLVESGGGLVQPG
GSLRLSCAASGFTFSSYAMSWVRRAPGKGLEWVSAINSDGTGSSYAPFVTGRFTASR
DNAKNTLYLQMNSLKPEDTAVYYQTNSNRYDYADFSAVRGQGTQVTVSS
IL6R105E1-GS35r-IL6R103A5, SEQ ID NO: 900
EVQLVESGGGLVQAGGSLRLSCAASGSIFSIKAMGWYRQAPGKQRELVARITSGGST
YYADSVKGRFTISRDNAKNTVYLQMNSLKPEDTAVFYCNAIVTDSDYDLGNDYWGQG
TQVTVSSGGGGSGGGGSGGGGSGGGGSGGGGSGGGGSGGGGSEVQLVESGGGLVQAG
DSLRLSCVASGLPFSTLHMGWFRQAPGKEHESVSAISSDGGSEYYAGSVKGRFTISR
DNAKNTVYLQMNSLKPEDTAVYYCAADPRRIGANIKYSDYWGQGTQVTVSS
IL6R105E1-GS35-IL6R103B2, SEQ ID NO: 901
EVQLVESGGGLVQAGGSLRLSCAASGSIFSIKAMGWYRQAPGKQRELVARITSGGST
YYADSVKGRFTISRDNAKNTVYLQMNSLKPEDTAVFYCNAIVTDSDYDLGNDYWGQG
TQVTVSSGGGGSGGGGSGGGGSGGGGSGGGGSGGGGSGGGGSEVQLVESGGGLVQPG
GSLRLSCAASGSTFSINMMAWYCQAPGKQRELVASISSGGGINYADSVKGRFTISRD
YAENSVDLQMNSLKPEDTAVYYCNARGTYLNGDHYSTNYNSWGQGTQVTVSS
IL6R103C4-GS35-IL6R100D11, SEQ ID NO: 902
EVQLVESGGGLVEAGGSLRLSCAAAGRTLSSYSMAWFRQAPGKEREFVAIIRGNPSR
TYHSDSVKGRFTASRDNAKNTVYLQMNRLEPEDTAVYYCAADPPPFASDYSAPQSYD
YWGQGTQVTVSSGGGGSGGGGSGGGGSGGGGSGGGGSGGGGSGGGGSEVQLVESGGG
LVQAGDSLRLSCLASGRSFKDDAMGWFRQAPGKEREFVSGIDWRGNIVDAESVKGRF
TISRENAKNTLYLQMNHLKPEDTAVYYCAASSVFSDLRYRKNPKYWGQGTQVTVSS
IL6R103C4-GS35-IL6R101B12, SEQ ID NO: 903
EVQLVESGGGLVEAGGSLRLSCAAAGRTLSSYSMAWFRQAPGKEREFVAIIRGNPSR
TYHSDSVKGRFTASRDNAKNTVYLQMNRLEPEDTAVYYCAADPPPFASDYSAPQSYD
YWGQGTQVTVSSGGGGSGGGGSGGGGSGGGGSGGGGSGGGGSGGGGSEVQLVESGGG
LVQPGGSLRLSCAASGVTLDYYAIGWFRQAPGKEREGVSSISSNDGSTFYADSVKGR
FTISRDKAKNTVYLQMNSLKPEDTAVYYCAATYLTAQAVGVPVAYYEFDYWGQGTQV
TVSS
IL6R103C4-GS35-IL6R107H2, SEQ ID NO: 904
EVQLVESGGGLVEAGGSLRLSCAAAGRTLSSYSMAWFRQAPGKEREFVAIIRGNPSR
TYHSDSVKGRFTASRDNAKNTVYLQMNRLEPEDTAVYYCAADPPPFASDYSAPQSYD
YWGQGTQVTVSSGGGGSGGGGSGGGGSGGGGSGGGGSGGGGSGGGGSKVQLVESGGG
LVQPGGSLRLSCAASGFTFSSYAMSWVRRAPGKGLEWVSAINSDGTGSSYAPFVTGR
FTASRDNAKNTLYLQMNSLKPEDTAVYYCTNSNRYDYADFSAVRGQGTQVTVSS
IL6R103C4-GS35-IL6R103A5, SEQ ID NO: 905
EVQLVESGGGLVEAGGSLRLSCAAAGRTLSSYSMAWFRQAPGKEREFVAIIRGNPSR
TYHSDSVKGRFTASRDNAKNTVYLQMNRLEPEDTAVYYCAADPPPFASDYSAPQSYD
YWGQGTQVTVSSGGGGSGGGGSGGGGSGGGGSGGGGSGGGGSGGGGSEVQLVESGGG
LVQAGDSLRLSCVASGLPFSTLHMGWFRQAPGKEHESVSAISSDGGSEYYAGSVKGR
FTISRDNAKNTVYLQMNSLKPEDTAVYYCAADPRRIGANIKYSDYWGQGTQVTVSS
IL6R103C4-GS35-IL6R103B2, SEQ ID NO: 906
EVQLVESGGGLVEAGGSLRLSCAAAGRTLSSYSMAWFRQAPGKEREFVAIIRGNPSR
TYHSDSVKGRFTASRDNAKNTVYLQMNRLEPEDTAVYYCAADPPPFASDYSAPQSYD
YWGQGTQVTVSSGGGGSGGGGSGGGGSGGGGSGGGGSGGGGSGGGGSEVQLVESGGG
LVQPGGSLRLSCAASGSTFSINMMAWYCQAPGKQRELVASISSGGGINYADSVKGRF
TISRDYAENSVDLQMNSLKPEDTAVYYCNARGTYLNGDHYSTNYNSWGQGTQVTVSS
IL6R103H9-GS35-IL6R100D11, SEQ ID NO: 907
EVQLVESGGGLVQPGGSLRLSCAASKSIFDINAMYWHRQAPGKQRESVASITSGGMR
NYADSVKDRETISKDNAKNTVYLQMNGLKPDDTAVYYCGLGRYEGGVWRDYWGQGTQ
VTVSSGGGGSGGGGSGGGGSGGGGSGGGGSGGGGSGGGGSEVQLVESGGGLVQAGDS
LRLSCLASGRSFKDDAMGWFRQAPGKEREFVSGIDWRGNIVDAESVKGRFTISRENA
KNTLYLQMNHLKPEDTAVYYCAASSVFSDLRYRKNPKYWGQGTQVTVSS
IL6R103H9-GS35-IL6R101B12, SEQ ID NO: 908
EVQLVESGGGLVQPGGSLRLSCAASKSIFDINAMYWHRQAPGKQRESVASITSGGMR
NYADSVKDRFTISKDNAKNTVYLQMNGLKPDDTAVYYCGLGRYEGGVWRDYWGQGTQ
VTVSSGGGGSGGGGSGGGGSGGGGSGGGGSGGGGSGGGGSEVQLVESGGGLVQPGGS
LRLSCAASGVTLDYYAIGWFRQAPGKEREGVSSISSNDGSTFYADSVKGRFTISRDK
AKNTVYLQMNSLKPEDTAVYYCAATYLTAQAVGVPVAYYEFDYWGQGTQVTVSS
IL6R103H9-GS35-IL6R107H2, SEQ ID NO: 909
EVQLVESGGGLVQPGGSLRLSCAASKSIFDINAMYWHRQAPGKQRESVASITSGGMR
NYADSVKDRFTISKDNAKNTVYLQMNGLKPDDTAVYYCGLGRYEGGVWRDYWGQGTQ
VTVSSGGGGSGGGGSGGGGSGGGGSGGGGSGGGGSGGGGSKVQLVESGGGLVQPGGS
LRLSCAASGFTFSSYAMSWVRRAPGKGLEWVSAINSDGTGSSYAPFVTGRFTASRDN
AKNTLYLQMNSLKPEDTAVYYCTNSNRYDYADFSAVRGQGTQVTVSS
IL6R103H9-GS35-IL6R103A5, SEQ ID NO: 910
EVQLVESGGGLVQPGGSLRLSCAASKSIFDINAMYWHRQAPGKQRESVASITSGGMR
NYADSVKDRFTISKDNAKNTVYLQMNGLKPDDTAVYYCGLGRYEGGVWRDYWGQGTQ
VTVSSGGGGSGGGGSGGGGSGGGGSGGGGSGGGGSGGGGSEVQLVESGGGLVQAGDS
LRLSCVASGLPFSTLHMGWFRQAPGKEHESVSAISSDGGSEYYAGSVKGRFTISRDN
AKNTVYLQMNSLKPEDTAVYYCAADPRRIGANIKYSDYWGQGTQVTVSS
IL6R103H9-GS35-IL6R103B2, SEQ ID NO: 911
EVQLVESGGGLVQPGGSLRLSCAASKSIFDINAMYWHRQAPGKQRESVASITSGGMRN
YADSVKDRFTISKDNAKNTVYLQMNGLKPDDTAVYYCGLGRYEGGVWRDYWGQGTQVT
VSSGGGGSGGGGSGGGGSGGGGSGGGGSGGGGSGGGGSEVQLVESGGGLVQPGGSLRL
SCAASGSTFSINMMAWYCQAPGKQRELVASISSGGGINYADSVKGRFTISRDYAENSV
DLQMNSLKPEDTAVYYCNARGTYLNGDHYSTNYNSWGQGTQVTVSS
IL6R107A1-GS35-IL6R100D11, SEQ ID NO: 912
EVQLVESGGGLVQAGGSLNLSCNASGDIGSINAMGWYRQAPGQQREWVAVITDTDSTI
YPDSVKGRFAISRDGAKNTVHLRMSSLKPEDTAVYYCNAYQAGWGDYWGQGTQVTVSS
GGGGSGGGGSGGGGSGGGGSGGGGSGGGGSGGGGSEVQLVESGGGLVQAGDSLRLSCL
ASGRSFKDDAMGWFRQAPGKEREFVSGIDWRGNIVDAESVKGRFTISRENAKNTLYLQ
MNHLKPEDTAVYYCAASSVFSDLRYRKNPKYWGQGTQVTVSS
IL6R107A1-GS35-IL6R101B12, SEQ ID NO: 913
EVQLVESGGGLVQAGGSLNLSCNASGDIGSINAMGWYRQAPGQQREWVAVITDTDSTI
YPDSVKGRFAISRDGAKNTVHLRMSSLKPEDTAVYYCNAYQAGWGDYWGQGTQVTVSS
GGGGSGGGGSGGGGSGGGGSGGGGSGGGGSGGGGSEVQLVESGGGLVQPGGSLRLSCA
ASGVTLDYYAIGWFRQAPGKEREGVSSISSNDGSTFYADSVKGRFTISRDKAKNTVYL
QMNSLKPEDTAVYYCAATYLTAQAVGVPVAYYEFDYWGQGTQVTVSS
IL6R107A1-GS35-IL6R107H2, SEQ ID NO: 914
EVQLVESGGGLVQAGGSLNLSCNASGDIGSINAMGWYRQAPGQQREWVAVITDTDSTI
YPDSVKGRFAISRDGAKNTVHLRMSSLKPEDTAVYYCNAYQAGWGDYWGQGTQVTVSS
GGGGSGGGGSGGGGSGGGGSGGGGSGGGGSGGGGSKVQLVESGGGLVQPGGSLRLSCA
ASGFTFSSYAMSWVRRAPGKGLEWVSAINSDGTGSSYAPFVTGRFTASRDNAKNTLYL
QMNSLKPEDTAVYYCTNSNRYDYADFSAVRGQGTQVTVSS
IL6R107A1-GS35-IL6R103A5, SEQ ID NO: 915
EVQLVESGGGLVQAGGSLNLSCNASGDIGSINAMGWYRQAPGQQREWVAVITDTDSTI
YPDSVKGRFAISRDGAKNTVHLRMSSLKPEDTAVYYCNAYQAGWGDYWGQGTQVTVSS
GGGGSGGGGSGGGGSGGGGSGGGGSGGGGSGGGGSEVQLVESGGGLVQAGDSLRLSCV
ASGLPFSTLHMGWFRQAPGKEHESVSAISSDGGSEYYAGSVKGRFTISRDNAKNTVYL
QMNSLKPEDTAVYYCAADPRRIGANIKYSDYWGQGTQVTVSS
IL6R107A1-GS35-IL6R103B2, SEQ ID NO: 916
EVQLVESGGGLVQAGGSLNLSCNASGDIGSINAMGWYRQAPGQQREWVAVITDTDSTI
YPDSVKGRFAISRDGAKNTVHLRMSSLKPEDTAVYYCNAYQAGWGDYWGQGTQVTVSS
GGGGSGGGGSGGGGSGGGGSGGGGSGGGGSGGGGSEVQLVESGGGLVQPGGSLRLSCA
ASGSTFSINMMAWYCQAPGKQRELVASISSGGGINYADSVKGRFTISRDYAENSVDLQ
MNSLKPEDTAVYYCNARGTYLNGDHYSTNYNSWGQGTQVTVSS
IL6R107A9-GS35-IL6R100D11, SEQ ID NO: 917
EVQLVESGGGLVQAGGSLRLSCAASGGIFSDMFMGWFRQAPGKSRESVARISPSGNTFY
QDSVRGRFTISTDNAKNTVYLQMNNLKPEDTAVYYCAANVGVTGSYEYWGQGTQVTVSS
GGGGSGGGGSGGGGSGGGGSGGGGSGGGGSGGGGSEVQLVESGGGLVQAGDSLRLSCLA
SGRSFKDDAMGWFRQAPGKEREFVSGIDWRGNIVDAESVKGRFTISRENAKNTLYLQMN
HLKPEDTAVYYCAASSVFSDLRYRKNPKYWGQGTQVTVSS
IL6R107A9-GS35-IL6R101B12, SEQ ID NO: 918
EVQLVESGGGLVQAGGSLRLSCAASGGIFSDMFMGWFRQAPGKSRESVARISPSGNTFY
QDSVRGRFTISTDNAKNTVYLQMNNLKPEDTAVYYCAANVGVTGSYEYWGQGTQVTVSS
GGGGSGGGGSGGGGSGGGGSGGGGSGGGGSGGGGSEVQLVESGGGLVQPGGSLRLSCAA
SGVTLDYYAIGWFRQAPGKEREGVSSISSNDGSTFYADSVKGRFTISRDKAKNTVYLQM
NSLKPEDTAVYYCAATYLTAQAVGVPVAYYEFDYWGQGTQVTVSS
IL6R107A9-GS35-IL6R107H2, SEQ ID NO: 919
EVQLVESGGGLVQAGGSLRLSCAASGGIFSDMFMGWFRQAPGKSRESVARISPSGNTFY
QDSVRGRFTISTDNAKNTVYLQMNNLKPEDTAVYYCAANVGVTGSYEYWGQGTQVTVSS
GGGGSGGGGSGGGGSGGGGSGGGGSGGGGSGGGGSKVQLVESGGGLVQPGGSLRLSCAA
SGFTFSSYAMSWVRRAPGKGLEWVSAINSDGTGSSYAPFVTGRFTASRDNAKNTLYLQM
NSLKPEDTAVYYCTNSNRYDYADFSAVRGQGTQVTVSS
IL6R107A9-GS35-IL6R103A5, SEQ ID NO: 920
EVQLVESGGGLVQAGGSLRLSCAASGGIFSDMFMGWFRQAPGKSRESVARISPSGNTFY
QDSVRGRFTISTDNAKNTVYLQMNNLKPEDTAVYYCAANVGVTGSYEYWGQGTQVTVS
SGGGGSGGGGSGGGGSGGGGSGGGGSGGGGSGGGGSEVQLVESGGGLVQAGDSLRLSC
VASGLPFSTLHMGWFRQAPGKEHESVSAISSDGGSEYYAGSVKGRFTISRDNAKNTVY
LQMNSLKPEDTAVYYCAADPRRIGANIKYSDYWGQGTQVTVSS
IL6R107A9-GS35-IL6R103B2, SEQ ID NO: 921
EVQLVESGGGLVQAGGSLRLSCAASGGIFSDMFMGWFRQAPGKSRESVARISPSGNTF
YQDSVRGRFTISTDNAKNTVYLQMNNLKPEDTAVYYCAANVGVTGSYEYWGQGTQVTV
SSGGGGSGGGGSGGGGSGGGGSGGGGSGGGGSGGGGSEVQLVESGGGLVQPGGSLRLS
CAASGSTFSINMMAWYCQAPGKQRELVASISSGGGINYADSVKGRFTISRDYAENSVD
LQMNSLKPEDTAVYYCNARGTYLNGDHYSTNYNSWGQGTQVTVSS
IL6R101B12-GS35-IL6R105E1, SEQ ID NO: 947
EVQLVESGGGLVQPGGSLRLSCAASGVTLDYYAIGWFRQAPGKEREGVSSISSNDGSTF
YADSVKGRFTISRDKAKNTVYLQMNSLKPEDTAVYYCAATYLTAQAVGVPVAYYEFDYW
GQGTQVTVSSGGGGSGGGGSGGGGSGGGGSGGGGSGGGGSGGGGSEVQLVESGGGLVQA
GGSLRLSCAASGSIFSIKAMGWYRQAPGKQRELVARITSGGSTYYADSVKGRFTISRDN
AKNTVYLQMNSLKPEDTAVFYCNAIVTDSDYDLGNDYWGQGTQVTVSS

TABLE A-6
Protein sequences of biparatopic anti-IL-6R Nanobodies
(IL6R-IL6 inhibiting block combined with a another
IL6R-IL6 inhibiting binding block)

IL6R120A5-GS9-IL6R100G11, SEQ ID NO: 922
EVQLVESGGGLVQAGGSLSLSCATSGRTISDDTMAWFRQAPGKEREFVAIITFNGART
HYSDSVRDRFTISRDNAKNTVYLQMNSLKSEDTAVYYCAASTKYYSSTYNYIHPAFYD
IWGQGTQVTVSSGGGGSGGGSEVQLVESGGGLVQAGGSLRLSCAASGRGFSPYTMGWF
RQAPGKERVFVAGISWSTGIAHYTDSVKGRFTISRDNAKNTGSLQMNSLKPEDTAVYY
CAVVQTTKGNYDYWGQGTQVTVSS
IL6R120A5-GS9-IL6R120G6, SEQ ID NO: 923
EVQLVESGGGLVQAGGSLSLSCATSGRTISDDTMAWFRQAPGKEREFVAIITFNGART
HYSDSVRDRFTISRDNAKNTVYLQMNSLKSEDTAVYYCAASTKYYSSTYNYIHPAFYD
IWGQGTQVTVSSGGGGSGGGSEVQLVESGGDLVQTGGSLRLSCAASGITVSDRAMGWY
RQAPGKQREMVAGVSRGGMTSYADSVKGRLTISRDNAKNSVYLQMNSLNPEDTAVYYC
SAYYRYGSSVPQYWGQGTQVTVSS
IL6R120A5-GS9-IL6R105E1, SEQ ID NO: 924
EVQLVESGGGLVQAGGSLSLSCATSGRTISDDTMAWFRQAPGKEREFVAIITFNGART
HYSDSVRDRFTISRDNAKNTVYLQMNSLKSEDTAVYYCAASTKYYSSTYNYIHPAFYD
IWGQGTQVTVSSGGGGSGGGSEVQLVESGGGLVQAGGSLRLSCAASGSIFSIKAMGWY
RQAPGKQRELVARITSGGSTYYADSVKGRFTISRDNAKNTVYLQMNSLKPEDTAVFYC
NAIVTDSDYDLGNDYWGQGTQVTVSS
IL6R120A5-GS9-IL6R104B8, SEQ ID NO: 925
EVQLVESGGGLVQAGGSLSLSCATSGRTISDDTMAWFRQAPGKEREFVAIITFNGART
HYSDSVRDRFTISRDNAKNTVYLQMNSLKSEDTAVYYCAASTKYYSSTYNYIHPAFYD
IWGQGTQVTVSSGGGGSGGGSEVQLVESGGGLVQAGGSLRLSCAASGFAFDDYAIGWF
RQAPGKEREGVSSISSSNGNTYYADSVRGRFTISSDNAKNTVYLQMNSLKPEDTGVYY
CAAIWGIFFNEKMPVGAYDYWGQGTQVTVSS
IL6R120A5-GS9-IL6R103C4, SEQ ID NO: 926
EVQLVESGGGLVQAGGSLSLSCATSGRTISDDTMAWFRQAPGKEREFVAIITFNGART
HYSDSVRDRFTISRDNAKNTVYLQMNSLKSEDTAVYYCAASTKYYSSTYNYIHPAFYD
IWGQGTQVTVSSGGGGSGGGSEVQLVESGGGLVEAGGSLRLSCAAAGRTLSSYSMAWF
RQAPGKEREFVAIIRGNPSRTYHSDSVKGRFTASRDNAKNTVYLQMNRLEPEDTAVYY
CAADPPPFASDYSAPQSYDYWGQGTQVTVSS
IL6R120G6-GS9-IL6R100G11, SEQ ID NO: 927
EVQLVESGGDLVQTGGSLRLSCAASGITVSDRAMGWYRQAPGKQREMVAGVSRGGMTS
YADSVKGRLTISRDNAKNSVYLQMNSLNPEDTAVYYCSAYYRYGSSVPQYWGQGTQVT
VSSGGGGSGGGSEVQLVESGGGLVQAGGSLRLSCAASGRGFSPYTMGWFRQAPGKERV
FVAGISWSTGIAHYTDSVKGRFTISRDNAKNTGSLQMNSLKPEDTAVYYCAVVQTTKG
NYDYWGQGTQVTVSS
IL6R120G6-GS9-IL6R105E1, SEQ ID NO: 928
EVQLVESGGDLVQTGGSLRLSCAASGITVSDRAMGWYRQAPGKQREMVAGVSRGGMTS
YADSVKGRLTISRDNAKNSVYLQMNSLNPEDTAVYYCSAYYRYGSSVPQYWGQGTQVT
VSSGGGGSGGGSEVQLVESGGGLVQAGGSLRLSCAASGSIFSIKAMGWYRQAPGKQRE
LVARITSGGSTYYADSVKGRFTISRDNAKNTVYLQMNSLKPEDTAVFYCNAIVTDSDY
DLGNDYWGQGTQVTVSS
IL6R120G6-GS9-IL6R104B8, SEQ ID NO: 929
EVQLVESGGDLVQTGGSLRLSCAASGITVSDRAMGWYRQAPGKQREMVAGVSRGGMTS
YADSVKGRLTISRDNAKNSVYLQMNSLNPEDTAVYYCSAYYRYGSSVPQYWGQGTQVT
VSSGGGGSGGGSEVQLVESGGGLVQAGGSLRLSCAASGFAFDDYAIGWFRQAPGKERE
GVSSISSSNGNTYYADSVRGRFTISSDNAKNTVYLQMNSLKPEDTGVYYCAAIWGIFF
NEKMPVGAYDYWGQGTQVTVSS
IL6R120G6-GS9-IL6R103C4, SEQ ID NO: 930
EVQLVESGGDLVQTGGSLRLSCAASGITVSDRAMGWYRQAPGKQREMVAGVSRGGMTS
YADSVKGRLTISRDNAKNSVYLQMNSLNPEDTAVYYCSAYYRYGSSVPQYWGQGTQVT
VSSGGGGSGGGSEVQLVESGGGLVEAGGSLRLSCAAAGRTLSSYSMAWFRQAPGKERE
FVAIIRGNPSRTYHSDSVKGRFTASRDNAKNTVYLQMNRLEPEDTAVYYCAADPPPFA
SDYSAPQSYDYWGQGTQVTVSS
IL6R105E1-GS9-IL6R100G11, SEQ ID NO: 931
EVQLVESGGGLVQAGGSLRLSCAASGSIFSIKAMGWYRQAPGKQRELVARITSGGSTY
YADSVKGRFTISRDNAKNTVYLQMNSLKPEDTAVFYCNAIVTDSDYDLGNDYWGQGTQ
VTVSSGGGGSGGGSEVQLVESGGGLVQAGGSLRLSCAASGRGFSPYTMGWFRQAPGKE
RVFVAGISWSTGIAHYTDSVKGRFTISRDNAKNTGSLQMNSLKPEDTAVYYCAVVQTT
KGNYDYWGQGTQVTVSS
IL6R105E1-GS9-IL6R104B8, SEQ ID NO: 932
EVQLVESGGGLVQAGGSLRLSCAASGSIFSIKAMGWYRQAPGKQRELVARITSGGSTY
YADSVKGRFTISRDNAKNTVYLQMNSLKPEDTAVFYCNAIVTDSDYDLGNDYWGQGTQ
VTVSSGGGGSGGGSEVQLVESGGGLVQAGGSLRLSCAASGFAFDDYAIGWFRQAPGKE
REGVSSISSSNGNTYYADSVRGRFTISSDNAKNTVYLQMNSLKPEDTGVYYCAAIWGI
FFNEKMPVGAYDYWGQGTQVTVSS
IL6R105E1-GS9-IL6R103C4, SEQ ID NO: 933
EVQLVESGGGLVQAGGSLRLSCAASGSIFSIKAMGWYRQAPGKQRELVARITSGGSTY
YADSVKGRFTISRDNAKNTVYLQMNSLKPEDTAVFYCNAIVTDSDYDLGNDYWGQGTQ
VTVSSGGGGSGGGSEVQLVESGGGLVEAGGSLRLSCAAAGRTLSSYSMAWFRQAPGKE
REFVAIIRGNPSRTYHSDSVKGRFTASRDNAKNTVYLQMNRLEPEDTAVYYCAADPPP
FASDYSAPQSYDYWGQGTQVTVSS
IL6R120A5-GS35-IL6R100G11, SEQ ID NO: 934
EVQLVESGGGLVQAGGSLSLSCATSGRTISDDTMAWFRQAPGKEREFVAIITFNGART
HYSDSVRDRFTISRDNAKNTVYLQMNSLKSEDTAVYYCAASTKYYSSTYNYIHPAFYD
IWGQGTQVTVSSGGGGSGGGGSGGGGSGGGGSGGGGSGGGGSGGGGSEVQLVESGGGL
VQAGGSLRLSCAASGRGFSPYTMGWFRQAPGKERVFVAGISWSTGIAHYTDSVKGRFT
ISRDNAKNTGSLQMNSLKPEDTAVYYCAVVQTTKGNYDYWGQGTQVTVSS
IL6R120A5-GS35-IL6R120G6, SEQ ID NO: 935
EVQLVESGGGLVQAGGSLSLSCATSGRTISDDTMAWFRQAPGKEREFVAIITFNGART
HYSDSVRDRFTISRDNAKNTVYLQMNSLKSEDTAVYYCAASTKYYSSTYNYIHPAFYD
IWGQGTQVTVSSGGGGSGGGGSGGGGSGGGGSGGGGSGGGGSGGGGSEVQLVESGGDL
VQTGGSLRLSCAASGITVSDRAMGWYRQAPGKQREMVAGVSRGGMTSYADSVKGRLTI
SRDNAKNSVYLQMNSLNPEDTAVYYCSAYYRYGSSVPQYWGQGTQVTVSS
IL6R120A5-GS35-IL6R105E1, SEQ ID NO: 936
EVQLVESGGGLVQAGGSLSLSCATSGRTISDDTMAWFRQAPGKEREFVAIITFNGART
HYSDSVRDRFTISRDNAKNTVYLQMNSLKSEDTAVYYCAASTKYYSSTYNYIHPAFYD
IWGQGTQVTVSSGGGGSGGGGSGGGGSGGGGSGGGGSGGGGSGGGGSEVQLVESGGGL
VQAGGSLRLSCAASGSIFSIKAMGWYRQAPGKQRELVARITSGGSTYYADSVKGRFTI
SRDNAKNTVYLQMNSLKPEDTAVFYCNAIVTDSDYDLGNDYWGQGTQVTVSS
IL6R120A5-GS35-IL6R104B8, SEQ ID NO: 937
EVQLVESGGGLVQAGGSLSLSCATSGRTISDDTMAWFRQAPGKEREFVAIITFNGART
HYSDSVRDRFTISRDNAKNTVYLQMNSLKSEDTAVYYCAASTKYYSSTYNYIHPAFYD
IWGQGTQVTVSSGGGGSGGGGSGGGGSGGGGSGGGGSGGGGSGGGGSEVQLVESGGGL
VQAGGSLRLSCAASGFAFDDYAIGWFRQAPGKEREGVSSISSSNGNTYYADSVRGRFT
ISSDNAKNTVYLQMNSLKPEDTGVYYCAAIWGIFFNEKMPVGAYDYWGQGTQVTVSS
IL6R120A5-GS35-IL6R103C4, SEQ ID NO: 938
EVQLVESGGGLVQAGGSLSLSCATSGRTISDDTMAWFRQAPGKEREFVAIITFNGART
HYSDSVRDRFTISRDNAKNTVYLQMNSLKSEDTAVYYCAASTKYYSSTYNYIHPAFYD
IWGQGTQVTVSSGGGGSGGGGSGGGGSGGGGSGGGGSGGGGSGGGGSEVQLVESGGGL
VEAGGSLRLSCAAAGRTLSSYSMAWFRQAPGKEREFVAIIRGNPSRTYHSDSVKGRFT
ASRDNAKNTVYLQMNRLEPEDTAVYYCAADPPPFASDYSAPQSYDYWGQGTQVTVSS
IL6R120G6-GS35-IL6R100G11, SEQ ID NO: 939
EVQLVESGGDLVQTGGSLRLSCAASGITVSDRAMGWYRQAPGKQREMVAGVSRGGMTS
YADSVKGRLTISRDNAKNSVYLQMNSLNPEDTAVYYCSAYYRYGSSVPQYWGQGTQVT
VSSGGGGSGGGGSGGGGSGGGGSGGGGSGGGGSGGGGSEVQLVESGGGLVQAGGSLRL
SCAASGRGFSPYTMGWFRQAPGKERVFVAGISWSTGIAHYTDSVKGRFTISRDNAKNT
GSLQMNSLKPEDTAVYYCAVVQTTKGNYDYWGQGTQVTVSS
IL6R120G6-GS35-IL6R105E1, SEQ ID NO: 940
EVQLVESGGDLVQTGGSLRLSCAASGITVSDRAMGWYRQAPGKQREMVAGVSRGGMTS
YADSVKGRLTISRDNAKNSVYLQMNSLNPEDTAVYYCSAYYRYGSSVPQYWGQGTQVT
VSSGGGGSGGGGSGGGGSGGGGSGGGGSGGGGSGGGGSEVQLVESGGGLVQAGGSLRL
SCAASGSIFSIKAMGWYRQAPGKQRELVARITSGGSTYYADSVKGRFTISRDNAKNT
VYLQMNSLKPEDTAVFYCNAIVTDSDYDLGNDYWGQGTQVTVSS
IL6R120G6-GS35-IL6R104B8, SEQ ID NO: 941
EVQLVESGGDLVQTGGSLRLSCAASGITVSDRAMGWYRQAPGKQREMVAGVSRGGMTS
YADSVKGRLTISRDNAKNSVYLQMNSLNPEDTAVYYCSAYYRYGSSVPQYWGQGTQVT
VSSGGGGSGGGGSGGGGSGGGGSGGGGSGGGGSGGGGSEVQLVESGGGLVQAGGSLRL
SCAASGFAFDDYAIGWFRQAPGKEREGVSSISSSNGNTYYADSVRGRFTISSDNAKNT
VYLQMNSLKPEDTGVYYCAAIWGIFFNEKMPVGAYDYWGQGTQVTVSS
IL6R120G6-GS35-IL6R103C4, SEQ ID NO: 942
EVQLVESGGDLVQTGGSLRLSCAASGITVSDRAMGWYRQAPGKQREMVAGVSRGGMTS
YADSVKGRLTISRDNAKNSVYLQMNSLNPEDTAVYYCSAYYRYGSSVPQYWGQGTQVT
VSSGGGGSGGGGSGGGGSGGGGSGGGGSGGGGSGGGGSEVQLVESGGGLVEAGGSLRL
SCAAAGRTLSSYSMAWFRQAPGKEREFVAIIRGNPSRTYHSDSVKGRFTASRDNAKNT
VYLQMNRLEPEDTAVYYCAADPPPFASDYSAPQSYDYWGQGTQVTVSS
IL6R105E1-GS35-IL6R100G11, SEQ ID NO: 943
EVQLVESGGGLVQAGGSLRLSCAASGSIFSIKAMGWYRQAPGKQRELVARITSGGSTY
YADSVKGRFTISRDNAKNTVYLQMNSLKPEDTAVFYCNAIVTDSDYDLGNDYWGQGTQ
VTVSSGGGGSGGGGSGGGGSGGGGSGGGGSGGGGSGGGGSEVQLVESGGGLVQAGGSL
RLSCAASGRGFSPYTMGWFRQAPGKERVFVAGISWSTGIAHYTDSVKGRFTISRDNAK
NTGSLQMNSLKPEDTAVYYCAVVQTTKGNYDYWGQGTQVTVSS
IL6R105E1-GS35-IL6R104B8, SEQ ID NO: 944
EVQLVESGGGLVQAGGSLRLSCAASGSIFSIKAMGWYRQAPGKQRELVARITSGGSTY
YADSVKGRFTISRDNAKNTVYLQMNSLKPEDTAVFYCNAIVTDSDYDLGNDYWGQGTQ
VTVSSGGGGSGGGGSGGGGSGGGGSGGGGSGGGGSGGGGSEVQLVESGGGLVQAGGS
LRLSCAASGFAFDDYAIGWFRQAPGKEREGVSSISSSNGNTYYADSVRGRFTISSDN
AKNTVYLQMNSLKPEDTGVYYCAAIWGIFFNEKMPVGAYDYWGQGTQVTVSS
IL6R105E1-GS35-IL6R103C4, SEQ ID NO: 945
EVQLVESGGGLVQAGGSLRLSCAASGSIFSIKAMGWYRQAPGKQRELVARITSGGST
YYADSVKGRFTISRDNAKNTVYLQMNSLKPEDTAVFYCNAIVTDSDYDLGNDYWGQG
TQVTVSSGGGGSGGGGSGGGGSGGGGSGGGGSGGGGSGGGGSEVQLVESGGGLVEAG
GSLRLSCAAAGRTLSSYSMAWFRQAPGKEREFVAIIRGNPSRTYHSDSVKGRFTASR
DNAKNTVYLQMNRLEPEDTAVYYCAADPPPFASDYSAPQSYDYWGQGTQVTVSS

TABLE A-7
Preferred, but non-limiting examples of
albumin-binding Nanobodies

ALB-1, SEQ ID NO: 948
[sequence omitted]
ALB-8(humanized ALB-1), SEQ ID NO: 949
[sequence omitted]
ALB-2, SEQ ID NO: 950
AVQLVESGGGLVQGGGSLRLACAASERIFDLNLMGWYRQGPGNERELVAT
CITVGDSTNYADSVKGRFTISMDYTKQTVYLHMNSLRPEDTGLYYCKIRR
TWHSELWGQGTQVTVSS

TABLE A-8
Sequences of possible linkers

GS35, SEQ ID NO: 951
GGGGSGGGGSGGGGSGGGGSGGGGSGGGGSGGGGS
GS30, SEQ ID NO: 952
GGGGSGGGGSGGGGSGGGGSGGGGSGGGGS
GS15, SEQ ID NO: 953
GGGGSGGGGSGGGGS
GS9, SEQ ID NO: 954
GGGGSGGGS
GS7, SEQ ID NO: 955
SGGSGGS
Llama upper long hinge region, SEQ ID NO: 956
EPKTPEKPQPAAA

TABLE C-1
Immunization protocol

| Day | Liama 128b | Liama 129b | Liama 130b | Tissue collection |
|---|---|---|---|---|
| 0 | 5E7 frozen cells | 5E7 frozen cells | 5E7 frozen cells | 10 ml pre-immune blood |
| | | | | 50 ml pre-immune blood |
| | | | | (NC0) |
| 14 | 2E7 frozen cells | 2E7 frozen cells | 2E7 frozen cells | 10 ml immune blood |
| 28 | 2E7 frozen cells | 2E7 frozen cells | 2E7 frozen cells | 10 ml immune blood |
| | | | | 150 ml immune blood (PBL1) |
| 35 | | | | 10 ml immune blood |
| 44 | 2E7 frozen cells | 2E7 frozen cells | 2E7 frozen cells | 10 ml immune blood |
| 49 | | | | 150 ml immune blood (PBL2) |
| | | | | 10 ml immune blood |
| | | | | lymph node bow biopsy |
| 53 | | | | 150 ml immune blood (PBL3) |
| | | | | 10 ml immune blood |
| 56 | | — | — | 100 ml immune blood (NC1) |
| 58 | — | | | 100 ml immune blood (NC1) |
| 88 | 25 μg hIL6R | 25 μg hIL6R | 25 μg hIL6R | — |
| 92 | | | | 150 ml immune blood (PBL4) |
| | | | | 10 ml immune blood |
| 99 | | | | 100 ml immune blood (NC2) |
| | | | | 10 ml immune blood |

TABLE C-2
Size and percentages of inserts of constructed libraries

| | Library size | % insert |
|---|---|---|
| 128b-PBL2 + 3 + LN | 7E6 | 91 |
| 129b-PBL2 + 3 + LN | 8E6 | 91 |
| 129b-PBL1 | 2E7 | 91 |
| 130b-PBL2 + 3 + LN | 7E6 | 91 |

TABLE C-3
Experimental conditions used in different selection strategies

| | immobilization/ | | Concentration/ | |
|---|---|---|---|---|
| Method | capture | Antigen | amount | Elution |
| Plate | BN-12 | IL-6R | 0, 100 nM | Trypsin |
| | | (Peprotech) | | (100 nM) |
| Plate | BN-12 | IL-6R | 0, 100 nM | Ref IgG |
| | | (Peprotech) | | (100 nM) |
| Plate | Direct coating of | IL-6R | 0, 100 nM | Trypsin |
| | the antigen | (Peprotech) | | (100 nM) |
| Magnetic | Streptavidin | bio-IL-6R | 0, 10, 100 nM | Trypsin |
| beads | | | | (100 nM) |
| Magnetic | Streptavidin | bio-IL-6R | 0, 10, 100 nM | IL6R300 |
| beads | | | | (100 nM) |

TABLE C-4
Results of screening for Nanobodies that inhibit
the IL-6/IL-6R interaction

| Assay | # clones screened | # inhibitors (%) |
|---|---|---|
| IL-6/IL-6R | 1744 | 327 (18.7%) |

TABLE C-5
Potency ELISA

| Clone | Family | ELISA 1 | ELISA 2 | ELISA 3 |
|---|---|---|---|---|
| PMP108D2 | 20 | 0.06242 | 0.34523 | 0.91642 |
| PMP101F6 | 7 | 0.07025 | 0.02726 | 0.94682 |
| PMP108E01 | 20 | 0.08939 | 0.35936 | 0.95376 |
| PMP101D2 | 3 | 0.12402 | 0.82169 | 0.97744 |
| PMP101B6 | 7 | 0.13356 | 0.03521 | 0.96132 |
| PMP120A5 | 28 | 0.13802 | 0.031 | 0.98831 |
| PMP120C10 | 28 | 0.13927 | 0.03513 | 1.00663 |
| PMP101G1 | 2 | 0.14831 | 0.0937 | 0.6386 |
| PMP105E1 | 7 | 0.2102 | 0.04016 | 0.99467 |
| PMP107A1 | 11 | 0.21525 | 0.29157 | 0.96721 |
| PMP101G11 | 2 | 0.22702 | 0.05382 | 0.46803 |
| PMP101B6 | 7 | 0.23543 | 0.05221 | 0.97746 |
| PMP120G6 | 93 | 0.23588 | 0.02893 | 0.99299 |
| PMP103D7 | 19 | 0.35456 | 0.08207 | 0.97994 |
| PMP101B3 | 6 | 0.40243 | 1.04997 | 0.9718 |
| PMP103C7 | 28 | 0.41323 | 0.17484 | 0.94776 |
| PMP107C3 | 11 | 0.43762 | 0.90376 | 1.05554 |
| PMP105D3 | 6 | 0.45717 | 0.99514 | 1.01409 |
| PMP120F4 | 86 | 0.49812 | 0.03307 | 0.92323 |
| PMP101A1 | 8 | 0.50824 | 0.52129 | 0.98912 |
| PMP107G10 | 11 | 0.52328 | 0.88303 | 1.0145 |
| PMP106F04 | 6 | 0.5568 | 1.1871 | 1.00588 |
| PMP120C1 | 28 | 0.56713 | 0.18668 | 1.01949 |
| PMP101F2 | 3 | 0.56895 | 0.81147 | 0.9718 |
| PMP105C2 | 6 | 0.57728 | 1.00665 | 0.99644 |
| PMP101C3 | 3 | 0.58023 | 0.80068 | 0.97542 |
| PMP107E4 | 11 | 0.59218 | 1.1894 | 1.02148 |
| PMP101G2 | 6 | 0.5967 | 1.04373 | 0.97542 |
| PMP120A1 | 28 | 0.59849 | 0.1977 | 1.01208 |
| PMP105H10 | 3 | 0.62663 | 0.67878 | 1.02435 |
| PMP120B2 | 28 | 0.64492 | 0.2039 | 1.01676 |
| PMP120D2 | 28 | 0.65872 | 0.15844 | 0.99299 |
| PMP106F7 | 6 | 0.67225 | 1.00205 | 1.00137 |
| PMP120C11 | 28 | 0.67252 | 0.29552 | 0.98753 |
| PMP105E11 | 3 | 0.67915 | 0.69135 | 0.97075 |
| PMP120B7 | 28 | 0.71393 | 0.29897 | 1.02767 |
| PMP101E1 | 3 | 0.71552 | 0.80466 | 0.94722 |
| PMP108E9 | 15 | 0.73091 | 0.96058 | 0.98947 |
| PMP100A10 | 4 | 0.74782 | 0.18912 | 0.96991 |
| PMP101F1 | 3 | 0.75369 | 0.82851 | 0.95689 |
| PMP101F3 | 3 | 0.75802 | 0.82169 | 0.98388 |
| PMP101H3 | 3 | 0.7719 | 0.85917 | 0.95407 |
| PMP101H6 | 5 | 0.78751 | 0.71323 | 0.95407 |
| PMP101A4 | 8 | 0.79185 | 0.71266 | 0.98993 |
| PMP101G4 | 3 | 0.79618 | 0.81488 | 1.02417 |
| PMP105B8 | 3 | 0.80819 | 0.81623 | 1.02927 |
| PMP101D1 | 5 | 0.8118 | 0.78989 | 0.92788 |
| PMP107H2 | 27 | 0.86499 | 0.59969 | 0.96156 |
| PMP108D1 | 5 | 0.86965 | 0.79012 | 1.03584 |
| PMP119A10 | 13 | 0.87704 | 0.24868 | 0.9887 |
| PMP107H5 | 11 | 0.9013 | 0.99744 | 1.03133 |
| PMP108C9 | 16 | 0.91061 | 0.90683 | 1.00917 |
| PMP100A6 | 9 | 0.94796 | 0.72232 | 0.92305 |
| PMP103C4 | 19 | 0.95852 | 0.08193 | 1.00246 |
| PMP108D10 | 5 | 0.96089 | 0.76094 | 1.02558 |
| PMP106B2 | 6 | 0.99047 | 1.01526 | 0.98361 |
| PMP101A5 | 5 | 1.02949 | 0.73595 | 0.95044 |
| PMP101C2 | 5 | 1.0399 | 1.02669 | 0.95205 |
| PMP103A4 | 12 | 1.04004 | 0.91605 | 1.02517 |
| PMP108F7 | 5 | 1.04935 | 0.8001 | 1.0186 |
| PMP108C10 | 5 | 1.07076 | 0.79473 | 1.04323 |
| PMP101A3 | 5 | 1.07546 | 0.68654 | 0.94601 |
| PMP101G3 | 5 | 1.07979 | 0.77286 | 0.89202 |
| PMP107A9 | 21 | 1.08464 | 0.08675 | 0.99221 |
| PMP101D6 | 5 | 1.09107 | 0.73083 | 0.94762 |
| PMP101B2 | 5 | 1.0928 | 0.72743 | 0.90894 |
| PMP107B04 | 17 | 1.20484 | 0.91835 | 1.04118 |
| PMP106D06 | 22 | 1.2713 | 1.13173 | 1.0041 |
| PMP104E04 | 8 | 1.3352 | 0.83775 | 1.02951 |
| PMP104B08 | 3 | 1.463 | 0.73494 | 1.05287 |
| PMP103H09 | 13 | 1.58744 | 0.26265 | 0.99016 |
| PMP100G11 | 4 | 1.70684 | 0.20241 | 0.99672 |
| PMP102G3 | 11a | 1.75561 | 1.3245 | 0.96762 |
| PMP103B2 | 25 | 1.76401 | 0.80964 | 1.01885 |
| PMP100D11 | 9 | 1.89686 | 0.96225 | 0.96926 |
| PMP103F2 | 26 | 1.94563 | 1.09398 | 0.99344 |
| PMP103C3 | 14 | 2.01962 | 1.1004 | 1.00574 |
| PMP103A2 | 12 | 2.04148 | 1.08996 | 0.99303 |
| PMP104A08 | 5 | 2.04148 | 0.7253 | 0.97254 |
| PMP104E07 | 18 | 2.04148 | 0.99277 | 1.00984 |
| PMP104B9 | 5 | 2.0583 | 0.76627 | 0.99959 |
| PMP103A5 | 24 | 2.12052 | 0.85944 | 0.94262 |

TABLE C-6
koff rates for periplasmic extracts of selected clones
as measured in Biacore

| Clone | family | k_{off} rate human | k_{off} rate cyno |
|---|---|---|---|
| PMP101G11 | 2 | 4.20E−04 | inaccurate value |
| PMP104B8 | 3 | 1.00E−02 | 1.00E−02 |
| PMP105B8 | 3 | 1.00E−02 | 1.00E−02 |
| PMP105H10 | 3 | 1.00E−02 | 1.00E−02 |
| PMP100G11 | 4 | 2.70E−04 | 4.50E−04 |
| PMP104A8 | 5 | 8.50E−04 | 1.00E−03 |
| PMP104B9 | 5 | 2.30E−04 | 7.40E−04 |
| PMP108C10 | 5 | 6.80E−03 | 7.10E−04 |
| PMP108D1 | 5 | 6.60E−03 | 7.90E−04 |
| PMP108D10 | 5 | 9.40E−04 | 9.00E−04 |
| PMP108F07 | 5 | 1.00E−03 | 7.40E−04 |
| PMP101A5 | 5 | 2.70E−04 | 4.50E−04 |
| PMP101H6 | 5 | 1.10E−04 | 1.00E−04 |
| PMP105C2 | 6 | 1.00E−02 | no binding |
| PMP105D3 | 6 | 1.00E−02 | no binding |
| PMP106B2 | 6 | 1.00E−02 | no binding |
| PMP106F7 | 6 | 1.00E−02 | no binding |
| PMP105E01 | 7 | 4.10E−04 | 1.00E−03 |
| PMP101B6 | 7 | 5.80E−04 | 1.00E−03 |
| PMP104E4 | 8 | 7.50E−04 | 4.50E−04 |
| PMP100D11 | 9 | 1.20E−04 | 7.40E−04 |
| PMP107E4 | 11a | 1.00E−02 | no binding |
| PMP107G10 | 11a | ND | no binding |
| PMP107A1 | 11b | 7.50E−04 | 1.00E−02 |
| PMP107C3 | 11b | ND | no binding |
| PMP107H5 | 11b | 1.00E−03 | no binding |
| PMP103A2 | 12 | 9.50E−04 | 1.00E−03 |
| PMP103A4 | 12 | 1.40E−03 | 4.50E−04 |
| PMP103H9 | 13 | 1.00E−02 | 1.00E−02 |
| PMP103C3 | 14 | no binding | no binding |
| PMP108E9 | 15 | no binding | no binding |
| PMP108C9 | 16 | no binding | no binding |
| PMP107B4 | 17 | 1.00E−02 | 1.00E−02 |
| PMP104E7 | 18 | 1.00E−03 | no binding |
| PMP103C4 | 19 | 1.00E−03 | 1.00E−03 |
| PMP108E1 | 20 | 1.00E−04 | 1.00E−03 |
| PMP107A9 | 21 | 1.00E−02 | 1.00E−02 |
| PMP106D6 | 22 | 1.00E−03 | no binding |
| PMP103A5 | 24 | 3.90E−04 | 7.40E−04 |
| PMP103B2 | 25 | 1.00E−03 | 4.50E−04 |
| PMP103F2 | 26 | no binding | no binding |
| PMP107H2 | 27 | 1.00E−04 | ND |
| PMP120A5 | 28 | ND | ND |
| PMP120F4 | 86 | ND | ND |
| PMP120C5 | 87 | ND | ND |
| PMP120G11 | 89 | ND | ND |
| PMP120H6 | 92 | ND | ND |
| PMP120G6 | 93 | ND | ND |

TABLE C-7
Epitope mapping

| | | binding to | binding to |
|---|---|---|---|
| clone | family | human IL6-R | hybrid IL6-R |
| PMP101H6 | 5 | yes | yes |
| PMP107H2 | 27 | yes | yes |
| PMP103A4 | 12 | yes | yes |
| PMP108E5 | 20 | yes | yes |
| PMP107A1 | 11 | yes | yes |
| PMP100G11 | 4 | yes | yes |
| PMP101B12 | 2 | yes | no |
| PMP104E4 | 8 | yes | no |
| PMP103B2 | 25 | yes | no |
| PMP100D11 | 9 | yes | no |
| PMP103A5 | 24 | yes | no |

TABLE C-8
IC50 values of monovalent wild type Nanobodies
obtained in TF-1 assay

| clone | family | IC50 (nM) |
|---|---|---|
| PMP105E1 | 7 | 6.2 |
| PMP120A5 | 28 | 5.59 |
| PMP108E1 | 20 | 0.149 |
| PMP107A1 | 11 | 4.05 |
| PMP107A9 | 21 | 349 |
| PMP103H9 | 13 | 1470 |
| PMP103C4 | 19 | 15.56 |
| PMP120G6 | 93 | 10.23 |
| PMP103C7 | 28 | 61.26 |
| PMP100G11 | 4 | 115.8 |
| PMP104B8 | 3 | 244.7 |
| Ref IgG | | 0.53 |

TABLE C-9
IC50 values in potency ELISA obtained for monovalent
wild type Nanobodies

| | | IC50 on human | IC50 on cynomolgous |
|---|---|---|---|
| clone | family | plasma (nM) | plasma (nM) |
| PMP105E1 | 7 | 0.58 | 0.62 |
| PMP120A5 | 28 | 0.47 | 0.55 |
| PMP108E1 | 20 | 0.15 | 29.1 |
| PMP107A1 | 11 | 0.38 | 47.8 |
| PMP107A9 | 21 | 3.5 | 4.7 |
| PMP103H9 | 13 | 37.9 | 14.8 |
| PMP103C4 | 19 | 1.73 | 2.7 |
| PMP120G6 | 93 | 1.12 | 0.66 |
| PMP103C7 | 28 | 6.9 | 13.7 |
| PMP104B8 | 3 | 7.8 | 252 |

TABLE C-10
Overview of k_{d}/k_{off}-, kₐ-, and K_{d}-values for a selected
subset of 7 anti-IL-6R Nanobodies

| | | | |
|---|---|---|---|
| Clone | k_{d}/k_{off} (s⁻¹) | kₐ (1/Ms) | K_{d} (nM) |

PMP120A5
PMP105E1
PMP120G6
PMP101H6
PMP100G11
PMP104E4
PMP103A4

TABLE C-11
Inhibition of the Reference-Fab/IL-6R interaction by
14 selected inhibitory anti-IL-6R Nanobodies

| | | IC50 on CHO | IC50 on CHO |
|---|---|---|---|
| | | K1-human | K1-cynomolgous |
| clone | family | IL-6R (nM) | IL-6R(nM) |
| PMP105E1 | 7 | >100 | 13 |
| PMP120A5 | 28 | 63 | 27 |
| PMP108E1 | 20 | No competition | No competition |
| PMP107A1 | 11 | No competition | No competition |
| PMP101B12 | 2 | No competition | No competition |
| PMP103H9 | 13 | >50 | No accurate value |
| PMP103C4 | 19 | 37 | 30 |
| PMP120G6 | 93 | No competition | No competition |
| PMP103C7 | 28 | >100 | 75 |
| PMP100G11 | 4 | No competition | No competition |
| PMP104B8 | 3 | No competition | No competition |
| Ref Fab | | 3.40 | 0.80 |

TABLE C-12
Design of biparatopic anti-IL-6R Nanobodies

| Nanobody ID | design |
|---|---|
| IL6R0402 | PMP101H6-35GS-PMP105E1 |
| IL6R0401 | PMP101B12-35GS-PMP105E1 |

1. Polypeptide that is directed against and/or can specifically bind IL-6R, which is a multiparatopic polypeptide.

2. Polypeptide according to claim 1, which is a biparatopic polypeptide.

3. Polypeptide according to claim 1, which comprises at least one amino acid sequence directed against a first antigenic determinant, epitope, part or domain of IL-6R and at least one amino acid sequence directed against a second antigenic determinant, epitope, part or domain of IL-6R different from the first antigenic determinant, epitope, part or domain, optionally linked via a suitable linker.

4. Biparatopic polypeptide according to claim 3, which is capable of simultaneously binding to said first antigenic determinant, epitope, part or domain of IL-6R and to said second antigenic determinant, epitope, part or domain of IL-6R.

5. Polypeptide according to claim 1, wherein said polypeptide is directed against the IL-6 binding site on IL-6R.

6. Polypeptide according to claim 1, wherein said polypeptide is directed against the gp130 binding site on IL-6R and/or the IL-6/IL-6R complex.

7. Biparatopic polypeptide according to claim 1, which can simultaneously bind the IL-6 binding site on IL-6R and the gp130 binding site on IL-6R and/or the IL-6/IL-6R complex.

8. An amino acid sequence that essentially consists of 4 framework regions (FR1 to FR4, respectively) and 3 complementarity determining regions (CDR1 to CDR3, respectively), in which:
CDR1 is chosen from the amino acid sequences of SEQ ID NO's: 302-386; and
CDR2 is chosen from the amino acid sequences of SEQ ID NO's: 472-556; and
CDR3 is chosen from the amino acid sequences of SEQ ID NO's: 642-726.

9. An amino acid sequence according to claim 8, that essentially consists of a Nanobody that is chosen from the group consisting of SEQ ID NO's: 132-216.

10. A Nanobody directed against IL-6R that cross-blocks the binding of at least one of the amino acid sequences of SEQ ID NO's: 132-216 to IL-6R or that is cross-blocked from binding to IL-6R by at least one of the amino acid sequences of SEQ ID NO's: 132-216.

11. (canceled)

12. A polypeptide according to claim 1, which comprises or essentially consists of amino acid sequences that are chosen from the group consisting of domain antibodies, amino acid sequences that are suitable for use as a domain antibody, single domain antibodies, amino acid sequences that are suitable for use as a single domain antibody, “dAb”'s, amino acid sequences that are suitable for use as a dAb, or Nanobodies.

13. (canceled)

14. (canceled)

15. Compound or construct, that comprises or essentially consists of one or more polypeptides according to claim 1, and optionally further comprises one or more other groups, residues, moieties or binding units, optionally linked via one or more linkers.

16. Compound or construct according to claim 15, which has an increased half-life, compared to the corresponding polypeptide according to claim 1 per se.

17. (canceled)

18. Method for preparing and/or generating a multiparatopic polypeptide or construct, said method comprising at least the steps of linking two or more monovalent amino acid sequences that essentially consist of 4 framework regions (FR1 to FR4, respectively) and 3 complementarity determining regions (CDR1 to CDR3, respectively), in which:
CDR1 is chosen from the amino acid sequences of SEQ ID NO's: 302-386; and
CDR2 is chosen from the amino acid sequences of SEQ ID NO's: 472-556; and
CDR3 is chosen from the amino acid sequences of SEQ ID NO's: 642-726.

19. Nucleic acid or nucleotide sequence, that encodes an amino acid sequence according to claim 8.

20. Host or host cell that comprises a nucleic acid or nucleotide sequence according to claim 19.

21. Composition comprising at least one amino acid sequence according to claim 8.

22. Composition according to claim 21, which is a pharmaceutical composition.

23. Method for producing an amino acid sequence, said method at least comprising the steps of:
a) expressing, in a suitable host cell or host organism or in another suitable expression system, a nucleic acid or nucleotide sequence according to claim 19;
optionally followed by:
b) isolating and/or purifying the amino acid thus obtained.

24. Method for the prevention and/or treatment of at least one IL-6R related disease or disorder, said method comprising administering, to a subject in need thereof, a pharmaceutically active amount of at least one polypeptide according to claim 1.

The application's sequence listing, which the Patent Office published only in electronic form, follows.

SEQUENCE LISTING (831 sequences)

SEQ ID NO: 1 - protein, 449 aa, Artificial Sequence
  Recombinant antibody
QVQLQESGPGLVRPSQTLSLTCTVSGYSITSDHAWSWVRQPPGRGLEWIGYISYSGITTYNPSLKSRVTMLRDTSKNQFSLRLSSVTAADTAVYYCARSLARTTAMDYWGQGSLVTVSSASTKGPSVFPLAPSSKSTSGGTAALGCLVKDYFPEPVTVSWNSGALTSGVHTFPAVLQSSGLYSLSSVVTVPSSSLGTQTYICNVNHKPSNTKVDKKVEPKSCDKTHTCPPCPAPELLGGPSVFLFPPKPKDTLMISRTPEVTCVVVDVSHEDPEVKFNWYVDGVEVHNAKTKPREEQYNSTYRVVSVLTVLHQDWLNGKEYKCKVSNKALPAPIEKTISKAKGQPREPQVYTLPPSRDELTKNQVSLTCLVKGFYPSDIAVEWESNGQPENNYKTTPPVLDSDGSFFLYSKLTVDKSRWQQGNVFSCSVMHEALHNHYTQKSLSLSPGK

SEQ ID NO: 2 - protein, 214 aa, Artificial Sequence [sequence omitted]

SEQ ID NO: 3 - protein, 222 aa, Artificial Sequence
  Recombinant Fab
QVQLQESGPGLVRPSQTLSLTCTVSGYSITSDHAWSWVRQPPGRGLEWIGYISYSGITTYNPSLKSRVTMLRDTSKNQFSLRLSSVTAADTAVYYCARSLARTTAMDYWGQGSLVTVSSASTKGPSVFPLAPSSKSTSGGTAALGCLVKDYFPEPVTVSWNSGALTSGVHTFPAVLQSSGLYSLSSVVTVPSSSLGTQTYICNVNHKPSNTKVDKKVEPKSC

SEQ ID NO: 4 - protein, 214 aa, Artificial Sequence [sequence omitted]

SEQ ID NO: 5 - protein, 121 aa, Artificial Sequence [sequence omitted]

SEQ ID NO: 6 - protein, 322 aa, Artificial Sequence
  Hybrid IL-6R
MLAVGCALLAALLAAPGAALAPRRCPAQEVARGVLTSIPGATVTLICPGKEAAGNATIHWVYSGSQSREWTTTGNTLVLRAVQVNDTGHYLCFLDDHLVGTVPLLVDVPPEEPQLSCFRKSPLSNVVCEWGPRSTPSLTTKAVLLVRKFQNSPAEDFQEPCQYSQESQKFSCQLAVPEGDSSFYIVSMCVASSVGSKFSKTQTFQGCGILQPDPPANITVTAVARNPRWLSVTWQDPHSWNSSFYRLRFELRYRAERSKTFTTWMVKDLQHHCVIHDAWSGLRHVVQLRAQEEFGQGEWSEWSPEAMGTPWTGGGSHHHHHH

SEQ ID NO: 7 - protein, 119 aa, Artificial Sequence
  Nanobody
EVQLVESGGGLVQAGGSLRLSCAASGRGFSPYTMGWFRQAPGKERVFVAGISWSTGIAHYTDSVKGRFTISRDNAKNTGSLQMNSLKPEDTAVYYCAVVQTTKGNYDYWGQGTQVTVSS

SEQ ID NO: 8 - protein, 123 aa, Artificial Sequence
  Nanobody
EVQLVESGGGLVQAGDSLRLSCLASGRSFKDDAMGWFRQAPGKEREFVSGIDWRGNIVDAESVKGRFTISRENAKNTLYLQMNHLKPEDTAVYYCAASSVFSDLRYRKNPKYWGQGTQVTVSS

SEQ ID NO: 9 - protein, 123 aa, Artificial Sequence; identical to SEQ ID NO: 8
  Nanobody

SEQ ID NO: 10 - protein, 119 aa, Artificial Sequence; identical to SEQ ID NO: 7
  Nanobody

SEQ ID NO: 11 - protein, 123 aa, Artificial Sequence
  Nanobody
EVQLVESGGGTVQAGGSLKLSCAASGRTFTNYAMGWFRQAPGKEREFVAAIAYATHFADSVKGRFTISRGNAKNTVYLQMNSLKPEDTAVYYCAADLSLSKMVSKITSDMDYWGKGTLVTVSS

SEQ ID NO: 12 - protein, 122 aa, Artificial Sequence
  Nanobody
EVQLVESGGGLVQAGGPLRLSCTASGRTFTDYDMGWFRQAPGKEREVVAIIDTNGDNTLTVGSVKGRFAISSDNAKNTVYLQMNSLLPEDTAVYTCAAGAWSALRRSVANYWGQGTQVTVSS

SEQ ID NO: 13 - protein, 123 aa, Artificial Sequence
  Nanobody
EVQLVESGGGTVQAGGSLKLSCAASGRTFTNYAMGWFRQAPGKEREFVAAIAYATHFADSVKGRFTISRGNAKNTVYLQMNSLKPEDAAVYYCAADLSLSKMVSKITSDMDYWGKGTLVTVSS

SEQ ID NO: 14 - protein, 122 aa, Artificial Sequence
  Nanobody
EVQLVESGGGLVQAGGSLRLSCTASGRTFSDYDMGWFRQAPGKERECVAIIDTNGDNTLIVGSVKGRFAISSDNAKNTVYLQMNSLLPEDTAVYTCAAGVWSSLRHTAANYWGQGTQVTVSS

SEQ ID NO: 15 - protein, 128 aa, Artificial Sequence
  Nanobody
EVQLVESGGGLVQPGGSLRLSCAASGVTLDYYAIGWFRQAPGKEREGVSSISSNDGSTFYADSVKGRFTISRDKAKNTVYLQMNSLKPEDTAVYYCAATYLTAQAVGVPVAYYEFDYWGQGTQVTVSS

SEQ ID NO: 16 - protein, 122 aa, Artificial Sequence
  Nanobody
EVQLVESGGGLVQAGGSLRLSCTASGRTFTDYDMGWFRQAPGKEREVVAIIDTNGDNTLTVGSVKGRFAISSDNAKNTVYLQMNSLLPEDTAVYTCAAGAWSALRRSVANYWGQGTQVTVSS

SEQ ID NO: 17 - protein, 125 aa, Artificial Sequence
  Nanobody
EVQLVESGGGLVQAGGSLRLSCAASGSIFRINAMGWYRQAPGKQRELVAAAISGGSTNYADFVKGRFTISRDNAKNTVYLQMNSLKPEDTAVYYCNALVVSHNYSDYVPFPDDYWGQGTQVTVSS

SEQ ID NO: 18 - protein, 121 aa, Artificial Sequence
  Nanobody
EVQLVESGGGLVQAGGSLRLSCAASGSDFSIKAMGWYRQAPGKQRELVARITSGGSTVYADSVKGRFTISRDNAKNTVYLQMNSLKPEDATVYYCNAIVTYSDYDLGNDYWGQGTQVTVSS

SEQ ID NO: 19 - protein, 122 aa, Artificial Sequence; identical to SEQ ID NO: 14
  Nanobody

SEQ ID NO: 20 - protein, 126 aa, Artificial Sequence
  Nanobody
EVQLVESGGGLVRAGGSLRLSCAASGFAFDDYAIGWFRQAPGKEREGVSSISSSNGNTYYADSVRGRFTISSDNAKNTVYLQMNSLKPEDTGVYYCAAIWGIFFNEKMPVGAYDYWGQGTQVTVSS

SEQ ID NO: 21 - protein, 122 aa, Artificial Sequence; identical to SEQ ID NO: 14
  Nanobody

SEQ ID NO: 22 - protein, 126 aa, Artificial Sequence
  Nanobody
EVQMVESGGGLVQAGGSLRLSCAASGFAFDDYAIGWFRQAPGKEREGVSSISSSNGNTYYADSVRGRFTISSDNAKNTVYLQMNSLKPEDAGVYYCAAIWGIFFNEKMPVGAYDYWGQGTQVTVSS

SEQ ID NO: 23 - protein, 122 aa, Artificial Sequence; identical to SEQ ID NO: 14
  Nanobody

SEQ ID NO: 24 - protein, 126 aa, Artificial Sequence
  Nanobody
EVQLVESGGGLVQAGGSLRLSCAASGFAFDDYAIGWFRQAPGKEREGVSSISSSNGNTYYADSVRGRFTISSDNAKNTVYLQMNSLKPEDTGVYYCAAIWGIFFNEKMPVGAYDYWGQGTQVTVSS

SEQ ID NO: 25 - protein, 126 aa, Artificial Sequence; identical to SEQ ID NO: 24
  Nanobody

SEQ ID NO: 26 - protein, 126 aa, Artificial Sequence; identical to SEQ ID NO: 24
  Nanobody

SEQ ID NO: 27 - protein, 126 aa, Artificial Sequence; identical to SEQ ID NO: 24
  Nanobody

SEQ ID NO: 28 - protein, 121 aa, Artificial Sequence
  Nanobody
EVQLVESGGGLVQAGGSLRLSCAASGSIFSIKAMGWYRQAPGKQRELVARITSGGSTYYADSVKGRFTISRDNAKNTVYLQMNSLKPEDTAVFYCNAIVTDSDYDLGNDYWGQGTQVTVSS

SEQ ID NO: 29 - protein, 128 aa, Artificial Sequence
  Nanobody
EVQLVESGGGLVQPGGSLRLSCAASGGTLDYYAIGWFRQAPGKEREGVSCISSSDGSTYYASSVKGRFTVSRDKAKNTVYLQMNSLKPEDTAVYYCAFVFTTAQAMGVPNNPYEYDFWGQGTQVTVSS

SEQ ID NO: 30 - protein, 130 aa, Artificial Sequence
  Nanobody
EVQLVESGGGLVQPGGSLRLSCAASASGFTLDYYAIGWFRQAPGKEREGVSCISSTDGSTYYADSVKGRFTISRDNAKNTVYLQMNSLNPEDTGVYTCAAVLTTAQAMGVPTRSYEYDYWGQGTQVTVSS

SEQ ID NO: 31 - protein, 125 aa, Artificial Sequence; identical to SEQ ID NO: 17
  Nanobody

SEQ ID NO: 32 - protein, 122 aa, Artificial Sequence; identical to SEQ ID NO: 14
  Nanobody

SEQ ID NO: 33 - protein, 126 aa, Artificial Sequence; identical to SEQ ID NO: 24
  Nanobody

SEQ ID NO: 34 - protein, 126 aa, Artificial Sequence; identical to SEQ ID NO: 24
  Nanobody

SEQ ID NO: 35 - protein, 122 aa, Artificial Sequence
  Nanobody
EMQLVESGGGLVQAGGSLRLSCTASGRTFTDYDMGWFRQAPGKEREVVAIIDTNGDNTLTVGSVKGRFAISSDNAKNTVYLQMNSLLPEDTAVYTCAAGAWSALRRSVANYWGQGTQVTVSS

SEQ ID NO: 36 - protein, 116 aa, Artificial Sequence
  Nanobody
EVQLVESGGGLVQAGGSLRLSCAASGSIDRINAMGWYRQAPGKQRDFLAVITDGDKTLYADSVKGRFTISNDNAKNTVYLQMNSLKPEDTAVYYCNAYQAGWGDYWGQGTQVTVSS

SEQ ID NO: 37 - protein, 120 aa, Artificial Sequence
  Nanobody
EVQLVESGGGLVQPGGSLRLSCAASGSIFSINTMGWYRQVPGKQRELVATVRSGSITNYADSVQDQFTITRDIDENTVYLQMNSLKPEDTAVYYCLTRASVPGRGYQDYWGQGTQVTVSS

SEQ ID NO: 38 - protein, 120 aa, Artificial Sequence
  Nanobody
EVQLVESGGGLVQPGGSLRLSCAASGSIFSINTMGWYRQVPGKQRELVATVRSGSITNYADSVQDRFTITRDIDENTVYLQMNSLKPEDTAVYYCLTRASVPGRGYQDYWGQGTQVTVSS

SEQ ID NO: 39 - protein, 123 aa, Artificial Sequence
  Nanobody
EVQLVESGGGLVQAGDSLRLSCVASGLPFSTLHMGWFRQAPGKEHESVSAISSDGGSEYYAGSVKGRFTISRDNAKNTVYLQMNSLKPEDTAVYYCAADPRRIGANIKYSDYWGQGTQVTVSS

SEQ ID NO: 40 - protein, 124 aa, Artificial Sequence
  Nanobody
EVQLVESGGGLVQPGGSLRLSCAASGSTFSINMMAWYCQAPGKQRELVASISSGGGINYADSVKGRFTISRDYAENSVDLQMNSLKPEDTAVYYCNARGTYLNGDHYSTNYNSWGQGTQVTVSS

SEQ ID NO: 41 - protein, 121 aa, Artificial Sequence
  Nanobody
EVQLVESGGGLVQPGGSMRLSCAATGAIFSISTMGWYRQAPGAQREFVAGVGLDGTPNYADSVKGRFTISRDNTKNTVSLQMENLKPEDTGVYYCNIDEGMDYDGNFYDRWGQGTQVTVSS

SEQ ID NO: 42 - protein, 126 aa, Artificial Sequence
  Nanobody
EVQLVESGGGLVEAGGSLRLSCAAAGRTLSSYSMAWFRQAPGKEREFVAIIRGNPSRTYHSDSVKGRFTASRDNAKNTVYLQMNRLEPEDTAVYYCAADPPPFASDYSAPQSYDYWGQGTQVTVSS

SEQ ID NO: 43 - protein, 128 aa, Artificial Sequence
  Nanobody
EVQLVESGGGLVQAGGSLSLSCATSGRTISDDTMAWFRQAPGKEREFVATITFSGARTHYSDSVRDRFTISRDNAKNTVYLQMDSLKSEDTAVYYCAASTKYYSSTYNYIHPAFYDIWGQGTQVTVSS

SEQ ID NO: 44 - protein, 126 aa, Artificial Sequence; identical to SEQ ID NO: 42
  Nanobody

SEQ ID NO: 45 - protein, 125 aa, Artificial Sequence
  Nanobody
EVQLVESGGGLVQAGGSLRLSCVASGHTSDTYIMAWFRQAPGKEREFVASILWDGSITYYADSVKDRFTISRDISRKTLYLQMNSLRPEDTATYTCARGIYFSRRYVDPGIYGTWGQGTQVTVSS

SEQ ID NO: 46 - protein, 119 aa, Artificial Sequence
  Nanobody
EVQLVESGGGLVQPGGSLRLSCAASKSIFDINAMYWHRQAPGKQRESVASITSGGMRNYADSVKDRFTISKDNAKNTVYLQMNGLKPDDTAVYYCGLGRYEGGVWRDYWGQGTQVTVSS

SEQ ID NO: 47 - protein, 122 aa, Artificial Sequence
  Nanobody
EVQLVESGGGLVQAGGSLRLSCTASGRTFSDYDMGWFRQAPGKEREFVAVIDTNGGHTLTVGSVKGRFAISSDNAKNTVYLQMNSLVPEDTAVYTCAAGAWSSLRKTAASYWGQGTQVTVSS

SEQ ID NO: 48 - protein, 126 aa, Artificial Sequence; identical to SEQ ID NO: 24
  Nanobody

SEQ ID NO: 49 - protein, 122 aa, Artificial Sequence; identical to SEQ ID NO: 14
  Nanobody

SEQ ID NO: 50 - protein, 123 aa, Artificial Sequence; identical to SEQ ID NO: 11
  Nanobody

SEQ ID NO: 51 - protein, 118 aa, Artificial Sequence
  Nanobody
EVQLVESGGGLVQAGGSLRLSCAAGGSIFSINAMGWYRQAPGKQRELVASITSGGSTTYADSVKGRFTISRDNAKDTVYLQMNSLKPEDTAVYYCNAHIRFPFPNDYWGQGTQVTVSS

SEQ ID NO: 52 - protein, 126 aa, Artificial Sequence; identical to SEQ ID NO: 20
  Nanobody

SEQ ID NO: 53 - protein, 125 aa, Artificial Sequence
  Nanobody
EVQLVESGGGLVQAGGSLRLSCAASGSIFRINAMGWYRQAPGEQRELVAAAISGGSTNYADFVKGRFTISRDNAKNTVYLQMNSLKPEDTAVYYCNALVVSHNYSDYVPFPDDYWGQGTQVTVSS

SEQ ID NO: 54 - protein, 125 aa, Artificial Sequence
  Nanobody
EVQLEESGGGLVQAGGSLRLSCAASGSIFRINAMGWYRQAPGKQRELVAAAISGGSTNYADFVKGRFTISRDNAKNTVYLQMNSLKPEDTAVYYCNALVVSHNYSDYVPFPDDYWGQGTQVTVSS

SEQ ID NO: 55 - protein, 121 aa, Artificial Sequence; identical to SEQ ID NO: 28
  Nanobody

SEQ ID NO: 56 - protein, 126 aa, Artificial Sequence
  Nanobody
EVQLVESGGGLVQAGGSLRLSCAASGFAFDDYAIGWFRQAPGKEREGVSSISSSNGNTYYADSVRGRFTISSDNAKNTVYLQMNGLKPEDTGVYYCAAIWGIFFNEKMPVGAYDYWGQGTQVTVSS

SEQ ID NO: 57 - protein, 126 aa, Artificial Sequence; identical to SEQ ID NO: 22
  Nanobody

SEQ ID NO: 58 - protein, 125 aa, Artificial Sequence; identical to SEQ ID NO: 17
  Nanobody

SEQ ID NO: 59 - protein, 128 aa, Artificial Sequence
  Nanobody
EVQLVESGGGLVQAGGSLRLSCAASGFTFDDYAIGWFRQAPGKEREGVSCMISSDGSTYYADSVKGRFTISSDNAKNTVYLQMDSLKPEDTAVYYCAADLSLYGCYVGDRDLYDYDYWGQGTQVTVSS

SEQ ID NO: 60 - protein, 125 aa, Artificial Sequence
  Nanobody
EVQLVESGGGLVQAGGSLRLSCAASGSIFRINAMGWYRQAPGKQRELVAAAISGGSTNYADFVKGRFTISRDNAKNTVYLQMNSLKPGDTAVYYCNALVVSHNYSDYVPFPDDYWGQGTQVTVSS

SEQ ID NO: 61 - protein, 125 aa, Artificial Sequence
  Nanobody
EVQLVESEGGLVQAGGSLRLSCAASGSIFRINAMGWYRQAPGKQRELVAAAISGGSTNYADFVKGRFTISRDNAKNTVYLQMNSLKPEDTAVYYCNALVVSHNYSDYVPFPDDYWGQGTQVTVSS

SEQ ID NO: 62 - protein, 116 aa, Artificial Sequence
  Nanobody
EVQLVESGGGLVQAGGSLNLSCNASGDIGSINAMGWYRQAPGQQREWVAVITDTDSTIYPDSVKGRFAISRDGAKNTVHLRMSSLKPEDTAVYYCNAYQAGWGDYWGQGTQVTVSS

SEQ ID NO: 63 - protein, 118 aa, Artificial Sequence
  Nanobody
EVQLVESGGGLVQAGGSLRLSCAASGGIFSDMFMGWFRQAPGKSRESVARISPSGNTFYQDSVRGRFTISTDNAKNTVYLQMNNLKPEDTAVYYCAANVGVTGSYEYWGQGTQVTVSS

SEQ ID NO: 64 - protein, 123 aa, Artificial Sequence
  Nanobody
EVQLVESGGGLVQAGGSLRLSCVASGLRLNMHRMGWFRQAPGKEREFVARIFTDDGDSYYADSVQGRFTISGDNAKNTVYLQMNSLKPEDTGVYFCAAGYMSGAESPIGYDNWGQGTQVTVSS

SEQ ID NO: 65 - protein, 116 aa, Artificial Sequence
  Nanobody
EVQLVESGGGLVQAGGSLNLSCNASGDIGSINAMGWHRQAPGQQREWVAVITDTDSTIYPDSVKGRFAISRDGAKNTVHLRMSSLKPEDTAVYYCNAYQAGWGDYWGQGTQVTVSS

SEQ ID NO: 66 - protein, 116 aa, Artificial Sequence; identical to SEQ ID NO: 36
  Nanobody

SEQ ID NO: 67 - protein, 116 aa, Artificial Sequence
  Nanobody
EVQLVESGGGLVQAGGSLRLSCAASGSIENINAMGWYRQAPGKQRDFLAIITDGSKTLYADSVKGRFTISNDNAKNTVYLQMNSLKPEDTAVYYCNAYQAGWGDYWGQGTQVTVSS

SEQ ID NO: 68 - protein, 121 aa, Artificial Sequence
  Nanobody
KVQLVESGGGLVQPGGSLRLSCAASGFTFSSYAMSWVRRAPGKGLEWVSAINSDGTGSSYAPFVTGRFTASRDNAKNTLYLQMNSLKPEDTAVYYCTNSNRYDYADFSAVRGQGTQVTVSS

SEQ ID NO: 69 - protein, 116 aa, Artificial Sequence
  Nanobody
EVPLVESGGGLVQAGGSLNLSCNASGDIGSINAMGWYRQAPGQQREWVAVITDTDSTIYPDSVKGRFAISRDGAKNTVHLRMSSLKPEDTAVYYCNAYQAGWGDYWGQGTQVTVSS

SEQ ID NO: 70 - protein, 122 aa, Artificial Sequence
  Nanobody
EVQLVESGGGLVQPGGSLRLSCTASGRTFSDYDMGWFRQAPGKERECVAVIDTNGDNTLTVGSVKGRFAISRDNAKNTVYLQMNSLLPEDTAVYTCAAGAWSSLRSTAANYWGQGTQVTVSS

SEQ ID NO: 71 - protein, 121 aa, Artificial Sequence
  Nanobody
EVQLVESGGGLVQAGGSLRLSCAASGRTYAMAWFRQAPGKEREFVAAISIVTDYADSVKGRFNISRDNRENTVYLQMNSLKPEDTAVYYCAANTYYSGAYFPRGHEWYEYWGQGTQVTVSS

SEQ ID NO: 72 - protein, 122 aa, Artificial Sequence
  Nanobody
EVQLVESGGGLVQAGGSLRLSCTASGRTFSDYDMGWFRQAPGKERECVAVIDTNGDNTLTVGSVKGRFAISRDNAKNTVYLQMNSLLPEDTAVYTCAAGAWSSLRSTAANYWGQGTKVTVSS

SEQ ID NO: 73 - protein, 122 aa, Artificial Sequence
  Nanobody
EVQLVESGGGSVQAGGSLRLSCTASGRTFSDYDMGWFRQAPGKERECVAVIDTNGDNTLTVGSVKGRFAISRDNAKNTVYLQMNSLLPEDTAVYTCAAGAWSSLRSTAANYWGQGTQVTVSS

SEQ ID NO: 74 - protein, 127 aa, Artificial Sequence
  Nanobody
EVQLVESGGGLVQAGGSLRLSCAASGFTFDDYDIGWFRQAPGKEREGVSGISSSDGNTYYADSVKGRFTISSDNAKNTVYLQMNSLKPEDTAVYYCAAEPPDSSWYLDGSPEFFKYWGQGTQVTVSS

SEQ ID NO: 75 - protein, 127 aa, Artificial Sequence; identical to SEQ ID NO: 74
  Nanobody

SEQ ID NO: 76 - protein, 125 aa, Artificial Sequence
  Nanobody
EVQLVESGGGLVQAGGSLRLSCAFSRRSFGNFPMGWFRQRPGEEREYVAVISWNNNYIHYRDSVKGRFTASRDTSENRMYLQMNGLKPEDTAVYYCAARTKDNTLFTPAEEYDYWGQGTQVTVSS

SEQ ID NO: 77 - protein, 122 aa, Artificial Sequence
  Nanobody
EVQLVESGGGLVQAGGSLRLSCTASGRTFSDYDMGWFRQAPGKERECVAVIDTNGDNTLTVGSVKGRFAISRDNAKNTVYLQMNSLLPEDTAVYTCAAGAWSSLRSTAANYWGQGTQVTVSS

SEQ ID NO: 78 - protein, 119 aa, Artificial Sequence; identical to SEQ ID NO: 46
  Nanobody

SEQ ID NO: 79 - protein, 128 aa, Artificial Sequence
  Nanobody
EVQLVESGGGLVQAGGSLSLSCATSGRTISDDTMAWFRQAPGKEREFVATITFSGARTHYSDSVRDRFTISRDNAKNTVYLQMNSLKSEDTAVYYCAASTKYYSSTYNYIHPAFYDIWGQGTQVTVSS

SEQ ID NO: 80 - protein, 128 aa, Artificial Sequence
  Nanobody
EVQLVESGGGLVQAGGSLSLSCATSGRTISDDTMAWFRQAPGKEREFVAIITFNGARTHYSDSVRDRFTISRDNAKNTVYLQMNSLKSEDTAVYYCAASTKYYSSTYNYIHPAFYDIWGQGTQVTVSS

SEQ ID NO: 81 - protein, 128 aa, Artificial Sequence; identical to SEQ ID NO: 79
  Nanobody

SEQ ID NO: 82 - protein, 128 aa, Artificial Sequence; identical to SEQ ID NO: 79
  Nanobody

SEQ ID NO: 83 - protein, 128 aa, Artificial Sequence; identical to SEQ ID NO: 79
  Nanobody

SEQ ID NO: 84 - protein, 128 aa, Artificial Sequence; identical to SEQ ID NO: 80
  Nanobody

SEQ ID NO: 85 - protein, 128 aa, Artificial Sequence; identical to SEQ ID NO: 79
  Nanobody

SEQ ID NO: 86 - protein, 123 aa, Artificial Sequence
  Nanobody
EVQLVESGGRSVQAGGSLRLSCAASGRTFRDYAMGWFRQAPGKEREFVAVISWSGAYTEYADSVKGRFTISRNNAANTGALQMNSLKLEDTAVYYCAATMVPRAMVVDEFEYWGQGTQVTVSS

SEQ ID NO: 87 - protein, 128 aa, Artificial Sequence; identical to SEQ ID NO: 79
  Nanobody

SEQ ID NO: 88 - protein, 117 aa, Artificial Sequence
  Nanobody
EVQLVESGGGLVQTGGSLRLSCAVSGRTDSTASVGWFRQAPGKQREWVVGISSGGSTHYADSVKGRFISSQDDAKNTVYLQMNSLKPEDTAIYYCAIAHGSSTYNYWGQGTQVTVSS

SEQ ID NO: 89 - protein, 119 aa, Artificial Sequence
  Nanobody
EVQLVESGGGLVQAGGSVRLSCTASGGTLSGNAMGWFRQAPGTEREFVAAITWSGDMSVYAEFVKGRFTVSRDNAKSVVYLQMNRLKPEDTSVYYCAGDIRGRENFGSWGQGTQVTVSS

SEQ ID NO: 90 - protein, 119 aa, Artificial Sequence
  Nanobody
EVQLVESGGDLVQTGGSLRLSCAASGITVSDRAMGWYRQAPGKQREMVAGVSRGGMTSYADSVKGRLTISRDNAKNSVYLQMNSLNPEDTAVYYCSAYYRYGSSVPQYWGQGTQVTVSS

SEQ ID NO: 91 - protein, 116 aa, Artificial Sequence
  Nanobody
EVQLVESGGGLVQPGGSLRLSCVVSGIIFSDNAMGWYRQYPGKQREWVAGISRGGTTGYTDSVKGRFTISRDNAKNTVYLQMNSLKPEDTAVYYCAIPTENQPDHWGQGTQVTVSS

SEQ ID NO: 92 - protein, 30 aa, Artificial Sequence
  Framework sequence
EVQLVESGGGLVQAGGSLRLSCAASGRGFS

SEQ ID NO: 93 - protein, 30 aa, Artificial Sequence
  Framework sequence
EVQLVESGGGLVQAGDSLRLSCLASGRSFK

SEQ ID NO: 94 - protein, 30 aa, Artificial Sequence; identical to SEQ ID NO: 93
  Framework sequence

SEQ ID NO: 95 - protein, 30 aa, Artificial Sequence; identical to SEQ ID NO: 92
  Framework sequence

SEQ ID NO: 96 - protein, 30 aa, Artificial Sequence
  Framework sequence
EVQLVESGGGTVQAGGSLKLSCAASGRTFT

SEQ ID NO: 97 - protein, 30 aa, Artificial Sequence
  Framework sequence
EVQLVESGGGLVQAGGPLRLSCTASGRTFT

SEQ ID NO: 98 - protein, 30 aa, Artificial Sequence; identical to SEQ ID NO: 96
  Framework sequence

SEQ ID NO: 99 - protein, 30 aa, Artificial Sequence
  Framework sequence
EVQLVESGGGLVQAGGSLRLSCTASGRTFS

SEQ ID NO: 100 - protein, 30 aa, Artificial Sequence
  Framework sequence
EVQLVESGGGLVQPGGSLRLSCAASGVTLD

SEQ ID NO: 101 - protein, 30 aa, Artificial Sequence
  Framework sequence
EVQLVESGGGLVQAGGSLRLSCTASGRTFT

SEQ ID NO: 102 - protein, 30 aa, Artificial Sequence
  Framework sequence
EVQLVESGGGLVQAGGSLRLSCAASGSIFR

SEQ ID NO: 103 - protein, 30 aa, Artificial Sequence
  Framework sequence
EVQLVESGGGLVQAGGSLRLSCAASGSDFS

SEQ ID NO: 104 - protein, 30 aa, Artificial Sequence; identical to SEQ ID NO: 99
  Framework sequence

SEQ ID NO: 105 - protein, 30 aa, Artificial Sequence
  Framework sequence
EVQLVESGGGLVRAGGSLRLSCAASGFAFD

SEQ ID NO: 106 - protein, 30 aa, Artificial Sequence; identical to SEQ ID NO: 99
  Framework sequence

SEQ ID NO: 107 - protein, 30 aa, Artificial Sequence
  Framework sequence
EVQMVESGGGLVQAGGSLRLSCAASGFAFD

SEQ ID NO: 108 - protein, 30 aa, Artificial Sequence; identical to SEQ ID NO: 99
  Framework sequence

SEQ ID NO: 109 - protein, 30 aa, Artificial Sequence
  Framework sequence
EVQLVESGGGLVQAGGSLRLSCAASGFAFD

SEQ ID NO: 110 - protein, 30 aa, Artificial Sequence; identical to SEQ ID NO: 109
  Framework sequence

SEQ ID NO: 111 - protein, 30 aa, Artificial Sequence; identical to SEQ ID NO: 109
  Framework sequence

SEQ ID NO: 112 - protein, 30 aa, Artificial Sequence; identical to SEQ ID NO: 109
  Framework sequence

SEQ ID NO: 113 - protein, 30 aa, Artificial Sequence
  Framework sequence
EVQLVESGGGLVQAGGSLRLSCAASGSIFS

SEQ ID NO: 114 - protein, 30 aa, Artificial Sequence
  Framework sequence
EVQLVESGGGLVQPGGSLRLSCAASGGTLD

SEQ ID NO: 115 - protein, 30 aa, Artificial Sequence
  Framework sequence
EVQLVESGGGLVQPGGSLRLSCAASASGFT

SEQ ID NO: 116 - protein, 30 aa, Artificial Sequence; identical to SEQ ID NO: 102
  Framework sequence

SEQ ID NO: 117 - protein, 30 aa, Artificial Sequence; identical to SEQ ID NO: 99
  Framework sequence

SEQ ID NO: 118 - protein, 30 aa, Artificial Sequence; identical to SEQ ID NO: 109
  Framework sequence

SEQ ID NO: 119 - protein, 30 aa, Artificial Sequence; identical to SEQ ID NO: 109
  Framework sequence

SEQ ID NO: 120 - protein, 30 aa, Artificial Sequence
  Framework sequence
EMQLVESGGGLVQAGGSLRLSCTASGRTFT

SEQ ID NO: 121 - protein, 30 aa, Artificial Sequence
  Framework sequence
EVQLVESGGGLVQAGGSLRLSCAASGSIDR

SEQ ID NO: 122 - protein, 30 aa, Artificial Sequence
  Framework sequence
EVQLVESGGGLVQPGGSLRLSCAASGSIFS

SEQ ID NO: 123 - protein, 30 aa, Artificial Sequence; identical to SEQ ID NO: 122
  Framework sequence

SEQ ID NO: 124 - protein, 30 aa, Artificial Sequence
  Framework sequence
EVQLVESGGGLVQAGDSLRLSCVASGLPFS

SEQ ID NO: 125 - protein, 30 aa, Artificial Sequence
  Framework sequence
EVQLVESGGGLVQPGGSLRLSCAASGSTFS

SEQ ID NO: 126 - protein, 30 aa, Artificial Sequence
  Framework sequence
EVQLVESGGGLVQPGGSMRLSCAATGAIFS

SEQ ID NO: 127 - protein, 30 aa, Artificial Sequence
  Framework sequence
EVQLVESGGGLVEAGGSLRLSCAAAGRTLS

SEQ ID NO: 128 - protein, 30 aa, Artificial Sequence
  Framework sequence
EVQLVESGGGLVQAGGSLSLSCATSGRTIS

SEQ ID NO: 129 - protein, 30 aa, Artificial Sequence; identical to SEQ ID NO: 127
  Framework sequence

SEQ ID NO: 130 - protein, 30 aa, Artificial Sequence
  Framework sequence
EVQLVESGGGLVQAGGSLRLSCVASGHTSD

SEQ ID NO: 131 - protein, 30 aa, Artificial Sequence
  Framework sequence
EVQLVESGGGLVQPGGSLRLSCAASKSIFD

SEQ ID NO: 132 - protein, 30 aa, Artificial Sequence; identical to SEQ ID NO: 99
  Framework sequence

SEQ ID NO: 133 - protein, 30 aa, Artificial Sequence; identical to SEQ ID NO: 109
  Framework sequence

SEQ ID NO: 134 - protein, 30 aa, Artificial Sequence; identical to SEQ ID NO: 99
  Framework sequence

SEQ ID NO: 135 - protein, 30 aa, Artificial Sequence; identical to SEQ ID NO: 96
  Framework sequence

SEQ ID NO: 136 - protein, 30 aa, Artificial Sequence
  Framework sequence
EVQLVESGGGLVQAGGSLRLSCAAGGSIFS

SEQ ID NO: 137 - protein, 30 aa, Artificial Sequence; identical to SEQ ID NO: 105
  Framework sequence

SEQ ID NO: 138 - protein, 30 aa, Artificial Sequence; identical to SEQ ID NO: 102
  Framework sequence

SEQ ID NO: 139 - protein, 30 aa, Artificial Sequence
  Framework sequence
EVQLEESGGGLVQAGGSLRLSCAASGSIFR

SEQ ID NO: 140 - protein, 30 aa, Artificial Sequence; identical to SEQ ID NO: 113
  Framework sequence

SEQ ID NO: 141 - protein, 30 aa, Artificial Sequence; identical to SEQ ID NO: 109
  Framework sequence

SEQ ID NO: 142 - protein, 30 aa, Artificial Sequence; identical to SEQ ID NO: 107
  Framework sequence

SEQ ID NO: 143 - protein, 30 aa, Artificial Sequence; identical to SEQ ID NO: 102
  Framework sequence

SEQ ID NO: 144 - protein, 30 aa, Artificial Sequence
  Framework sequence
EVQLVESGGGLVQAGGSLRLSCAASGFTFD

SEQ ID NO: 145 - protein, 30 aa, Artificial Sequence; identical to SEQ ID NO: 102
  Framework sequence

SEQ ID NO: 146 - protein, 30 aa, Artificial Sequence
  Framework sequence
EVQLVESEGGLVQAGGSLRLSCAASGSIFR

SEQ ID NO: 147 - protein, 30 aa, Artificial Sequence
  Framework sequence
EVQLVESGGGLVQAGGSLNLSCNASGDIGS

SEQ ID NO: 148 - protein, 30 aa, Artificial Sequence
  Framework sequence
EVQLVESGGGLVQAGGSLRLSCAASGGIFS

SEQ ID NO: 149 - protein, 30 aa, Artificial Sequence
  Framework sequence
EVQLVESGGGLVQAGGSLRLSCVASGLRLN

SEQ ID NO: 150 - protein, 30 aa, Artificial Sequence; identical to SEQ ID NO: 147
  Framework sequence

SEQ ID NO: 151 - protein, 30 aa, Artificial Sequence; identical to SEQ ID NO: 121
  Framework sequence

SEQ ID NO: 152 - protein, 30 aa, Artificial Sequence
  Framework sequence
EVQLVESGGGLVQAGGSLRLSCAASGSIEN

SEQ ID NO: 153 - protein, 30 aa, Artificial Sequence
  Framework sequence
KVQLVESGGGLVQPGGSLRLSCAASGFTFS

SEQ ID NO: 154 - protein, 30 aa, Artificial Sequence
  Framework sequence
EVPLVESGGGLVQAGGSLNLSCNASGDIGS

SEQ ID NO: 155 - protein, 30 aa, Artificial Sequence
  Framework sequence
EVQLVESGGGLVQPGGSLRLSCTASGRTFS

SEQ ID NO: 156 - protein, 30 aa, Artificial Sequence
  Framework sequence
EVQLVESGGGLVQAGGSLRLSCAASGRTYA

SEQ ID NO: 157 - protein, 30 aa, Artificial Sequence; identical to SEQ ID NO: 99
  Framework sequence

SEQ ID NO: 158 - protein, 30 aa, Artificial Sequence
  Framework sequence
EVQLVESGGGSVQAGGSLRLSCTASGRTFS

SEQ ID NO: 159 - protein, 30 aa, Artificial Sequence; identical to SEQ ID NO: 144
  Framework sequence

SEQ ID NO: 160 - protein, 30 aa, Artificial Sequence; identical to SEQ ID NO: 144
  Framework sequence

SEQ ID NO: 161 - protein, 30 aa, Artificial Sequence
  Framework sequence
EVQLVESGGGLVQAGGSLRLSCAFSRRSFG

SEQ ID NO: 162 - protein, 30 aa, Artificial Sequence; identical to SEQ ID NO: 99
  Framework sequence

SEQ ID NO: 163 - protein, 30 aa, Artificial Sequence; identical to SEQ ID NO: 131
  Framework sequence

SEQ ID NO: 164 - protein, 30 aa, Artificial Sequence; identical to SEQ ID NO: 128
  Framework sequence

SEQ ID NO: 165 - protein, 30 aa, Artificial Sequence; identical to SEQ ID NO: 128
  Framework sequence

SEQ ID NO: 166 - protein, 30 aa, Artificial Sequence; identical to SEQ ID NO: 128
  Framework sequence

SEQ ID NO: 167 - protein, 30 aa, Artificial Sequence; identical to SEQ ID NO: 128
  Framework sequence

SEQ ID NO: 168 - protein, 30 aa, Artificial Sequence; identical to SEQ ID NO: 128
  Framework sequence

SEQ ID NO: 169 - protein, 30 aa, Artificial Sequence; identical to SEQ ID NO: 128
  Framework sequence

SEQ ID NO: 170 - protein, 30 aa, Artificial Sequence; identical to SEQ ID NO: 128
  Framework sequence

SEQ ID NO: 171 - protein, 30 aa, Artificial Sequence
  Framework sequence
EVQLVESGGRSVQAGGSLRLSCAASGRTFR

SEQ ID NO: 172 - protein, 30 aa, Artificial Sequence; identical to SEQ ID NO: 128
  Framework sequence

SEQ ID NO: 173 - protein, 30 aa, Artificial Sequence
  Framework sequence
EVQLVESGGGLVQTGGSLRLSCAVSGRTDS

SEQ ID NO: 174 - protein, 30 aa, Artificial Sequence
  Framework sequence
EVQLVESGGGLVQAGGSVRLSCTASGGTLS

SEQ ID NO: 175 - protein, 30 aa, Artificial Sequence
  Framework sequence
EVQLVESGGDLVQTGGSLRLSCAASGITVS

SEQ ID NO: 176 - protein, 30 aa, Artificial Sequence
  Framework sequence
EVQLVESGGGLVQPGGSLRLSCVVSGIIFS

SEQ ID NO: 177 - protein, 5 aa, Artificial Sequence
  CDR1 sequence
PYTMG

SEQ ID NO: 178 - protein, 5 aa, Artificial Sequence
  CDR1 sequence
DDAMG

SEQ ID NO: 179 - protein, 5 aa, Artificial Sequence
  CDR1 sequence
DDAMG

SEQ ID NO: 180 - protein, 5 aa, Artificial Sequence
  CDR1 sequence
PYTMG

SEQ ID NO: 181 - protein, 5 aa, Artificial Sequence
  CDR1 sequence
NYAMG

SEQ ID NO: 182 - protein, 5 aa, Artificial Sequence
  CDR1 sequence
DYDMG

SEQ ID NO: 183 - protein, 5 aa, Artificial Sequence
  CDR1 sequence
NYAMG

SEQ ID NO: 184 - protein, 5 aa, Artificial Sequence
  CDR1 sequence
DYDMG

SEQ ID NO: 185 - protein, 5 aa, Artificial Sequence
  CDR1 sequence
YYAIG

SEQ ID NO: 186 - protein, 5 aa, Artificial Sequence
  CDR1 sequence
DYDMG

SEQ ID NO: 187 - protein, 5 aa, Artificial Sequence
  CDR1 sequence
INAMG

SEQ ID NO: 188 - protein, 5 aa, Artificial Sequence
  CDR1 sequence
IKAMG

SEQ ID NO: 189 - protein, 5 aa, Artificial Sequence
  CDR1 sequence
DYDMG

SEQ ID NO: 190 - protein, 5 aa, Artificial Sequence
  CDR1 sequence
DYAIG

SEQ ID NO: 191 - protein, 5 aa, Artificial Sequence
  CDR1 sequence
DYDMG

SEQ ID NO: 192 - protein, 5 aa, Artificial Sequence
  CDR1 sequence
DYAIG

SEQ ID NO: 193 - protein, 5 aa, Artificial Sequence
  CDR1 sequence
DYDMG

SEQ ID NO: 194 - protein, 5 aa, Artificial Sequence
  CDR1 sequence
DYAIG

SEQ ID NO: 195 - protein, 5 aa, Artificial Sequence
  CDR1 sequence
DYAIG

SEQ ID NO: 196 - protein, 5 aa, Artificial Sequence
  CDR1 sequence
DYAIG

SEQ ID NO: 197 - protein, 5 aa, Artificial Sequence
  CDR1 sequence
DYAIG

SEQ ID NO: 198 - protein, 5 aa, Artificial Sequence
  CDR1 sequence
IKAMG

SEQ ID NO: 199 - protein, 5 aa, Artificial Sequence
  CDR1 sequence
YYAIG

SEQ ID NO: 200 - protein, 7 aa, Artificial Sequence
  CDR1 sequence
LDYYAIG

SEQ ID NO: 201 - protein, 5 aa, Artificial Sequence
  CDR1 sequence
INAMG

SEQ ID NO: 202 - protein, 5 aa, Artificial Sequence
  CDR1 sequence
DYDMG

SEQ ID NO: 203 - protein, 5 aa, Artificial Sequence
  CDR1 sequence
DYAIG

SEQ ID NO: 204 - protein, 5 aa, Artificial Sequence
  CDR1 sequence
DYAIG

SEQ ID NO: 205 - protein, 5 aa, Artificial Sequence
  CDR1 sequence
DYDMG

SEQ ID NO: 206 - protein, 5 aa, Artificial Sequence
  CDR1 sequence
INAMG

SEQ ID NO: 207 - protein, 5 aa, Artificial Sequence
  CDR1 sequence
INTMG

SEQ ID NO: 208 - protein, 5 aa, Artificial Sequence
  CDR1 sequence
INTMG

SEQ ID NO: 209 - protein, 5 aa, Artificial Sequence
  CDR1 sequence
TLHMG

SEQ ID NO: 210 - protein, 5 aa, Artificial Sequence
  CDR1 sequence
INMMA

SEQ ID NO: 211 - protein, 5 aa, Artificial Sequence
  CDR1 sequence
ISTMG

SEQ ID NO: 212 - protein, 5 aa, Artificial Sequence
  CDR1 sequence
SYSMA

SEQ ID NO: 213 - protein, 5 aa, Artificial Sequence
  CDR1 sequence
DDTMA

SEQ ID NO: 214 - protein, 5 aa, Artificial Sequence
  CDR1 sequence
SYSMA

SEQ ID NO: 215 - protein, 5 aa, Artificial Sequence
  CDR1 sequence
TYIMA

SEQ ID NO: 216 - protein, 5 aa, Artificial Sequence
  CDR1 sequence
INAMY

SEQ ID NO: 217 - protein, 5 aa, Artificial Sequence
  CDR1 sequence
DYDMG

SEQ ID NO: 218 - protein, 5 aa, Artificial Sequence
  CDR1 sequence
DYAIG

SEQ ID NO: 219 - protein, 5 aa, Artificial Sequence
  CDR1 sequence
DYDMG

SEQ ID NO: 220 - protein, 5 aa, Artificial Sequence
  CDR1 sequence
NYAMG

SEQ ID NO: 221 - protein, 5 aa, Artificial Sequence
  CDR1 sequence
INAMG

SEQ ID NO: 222 - protein, 5 aa, Artificial Sequence
  CDR1 sequence
DYAIG

SEQ ID NO: 223 - protein, 5 aa, Artificial Sequence
  CDR1 sequence
INAMG

SEQ ID NO: 224 - protein, 5 aa, Artificial Sequence
  CDR1 sequence
INAMG

SEQ ID NO: 225 - protein, 5 aa, Artificial Sequence
  CDR1 sequence
IKAMG

SEQ ID NO: 226 - protein, 5 aa, Artificial Sequence
  CDR1 sequence
DYAIG

SEQ ID NO: 227 - protein, 5 aa, Artificial Sequence
  CDR1 sequence
DYAIG

SEQ ID NO: 228 - protein, 5 aa, Artificial Sequence
  CDR1 sequence
INAMG

SEQ ID NO: 229 - protein, 5 aa, Artificial Sequence
  CDR1 sequence
DYAIG

SEQ ID NO: 230 - protein, 5 aa, Artificial Sequence
  CDR1 sequence
INAMG

SEQ ID NO: 231 - protein, 5 aa, Artificial Sequence
  CDR1 sequence
INAMG

SEQ ID NO: 232 - protein, 5 aa, Artificial Sequence
  CDR1 sequence
INAMG

SEQ ID NO: 233 - protein, 5 aa, Artificial Sequence
  CDR1 sequence
DMFMG

SEQ ID NO: 234 - protein, 5 aa, Artificial Sequence
  CDR1 sequence
MHRMG

SEQ ID NO: 235 - protein, 5 aa, Artificial Sequence
  CDR1 sequence
INAMG

SEQ ID NO: 236 - protein, 5 aa, Artificial Sequence
  CDR1 sequence
INAMG

SEQ ID NO: 237 - protein, 5 aa, Artificial Sequence
  CDR1 sequence
INAMG

SEQ ID NO: 238 - protein, 5 aa, Artificial Sequence
  CDR1 sequence
SYAMS

SEQ ID NO: 239 - protein, 5 aa, Artificial Sequence
  CDR1 sequence
INAMG

SEQ ID NO: 240 - protein, 5 aa, Artificial Sequence
  CDR1 sequence
DYDMG

SEQ ID NO: 241 - protein, 2 aa, Artificial Sequence
  CDR1 sequence
MA

SEQ ID NO: 242 - protein, 5 aa, Artificial Sequence
  CDR1 sequence
DYDMG

SEQ ID NO: 243 - protein, 5 aa, Artificial Sequence
  CDR1 sequence
DYDMG

SEQ ID NO: 244 - protein, 5 aa, Artificial Sequence
  CDR1 sequence
DYDIG

SEQ ID NO: 245 - protein, 5 aa, Artificial Sequence
  CDR1 sequence
DYDIG

SEQ ID NO: 246 - protein, 5 aa, Artificial Sequence
  CDR1 sequence
NFPMG

SEQ ID NO: 247 - protein, 5 aa, Artificial Sequence
  CDR1 sequence
DYDMG

SEQ ID NO: 248 - protein, 5 aa, Artificial Sequence
  CDR1 sequence
INAMY

SEQ ID NO: 249 - protein, 5 aa, Artificial Sequence
  CDR1 sequence
DDTMA

SEQ ID NO: 250 - protein, 5 aa, Artificial Sequence
  CDR1 sequence
DDTMA

SEQ ID NO: 251 - protein, 5 aa, Artificial Sequence
  CDR1 sequence
DDTMA

SEQ ID NO: 252 - protein, 5 aa, Artificial Sequence
  CDR1 sequence
DDTMA

SEQ ID NO: 253 - protein, 5 aa, Artificial Sequence
  CDR1 sequence
DDTMA

SEQ ID NO: 254 - protein, 5 aa, Artificial Sequence
  CDR1 sequence
DDTMA

SEQ ID NO: 255 - protein, 5 aa, Artificial Sequence
  CDR1 sequence
DDTMA

SEQ ID NO: 256 - protein, 5 aa, Artificial Sequence
  CDR1 sequence
DYAMG

SEQ ID NO: 257 - protein, 5 aa, Artificial Sequence
  CDR1 sequence
DDTMA

SEQ ID NO: 258 - protein, 5 aa, Artificial Sequence
  CDR1 sequence
TASVG

SEQ ID NO: 259 - protein, 5 aa, Artificial Sequence
  CDR1 sequence
GNAMG

SEQ ID NO: 260 - protein, 5 aa, Artificial Sequence
  CDR1 sequence
DRAMG

SEQ ID NO: 261 - protein, 5 aa, Artificial Sequence
  CDR1 sequence
DNAMG

SEQ ID NO: 262 - protein, 14 aa, Artificial Sequence
  Framework sequence
WFRQAPGKERVFVA

SEQ ID NO: 263 - protein, 14 aa, Artificial Sequence
  Framework sequence
WFRQAPGKEREFVS

SEQ ID NO: 264 - protein, 14 aa, Artificial Sequence
  Framework sequence
WFRQAPGKEREFVS

SEQ ID NO: 265 - protein, 14 aa, Artificial Sequence
  Framework sequence
WFRQAPGKERVFVA

SEQ ID NO: 266 - protein, 14 aa, Artificial Sequence
  Framework sequence
WFRQAPGKEREFVA

SEQ ID NO: 267 - protein, 14 aa, Artificial Sequence
  Framework sequence
WFRQAPGKEREVVA

SEQ ID NO: 268 - protein, 14 aa, Artificial Sequence
  Framework sequence
WFRQAPGKEREFVA

SEQ ID NO: 269 - protein, 14 aa, Artificial Sequence
  Framework sequence
WFRQAPGKERECVA

SEQ ID NO: 270 - protein, 14 aa, Artificial Sequence
  Framework sequence
WFRQAPGKEREGVS

SEQ ID NO: 271 - protein, 14 aa, Artificial Sequence
  Framework sequence
WFRQAPGKEREVVA

SEQ ID NO: 272 - protein, 14 aa, Artificial Sequence
  Framework sequence
WYRQAPGKQRELVA

SEQ ID NO: 273 - protein, 14 aa, Artificial Sequence
  Framework sequence
WYRQAPGKQRELVA

SEQ ID NO: 274 - protein, 14 aa, Artificial Sequence
  Framework sequence
WFRQAPGKERECVA

SEQ ID NO: 275 - protein, 14 aa, Artificial Sequence
  Framework sequence
WFRQAPGKEREGVS

SEQ ID NO: 276 - protein, 14 aa, Artificial Sequence
  Framework sequence
WFRQAPGKERECVA

SEQ ID NO: 277 - protein, 14 aa, Artificial Sequence
  Framework sequence
WFRQAPGKEREGVS

SEQ ID NO: 278 - protein, 14 aa, Artificial Sequence
  Framework sequence
WFRQAPGKERECVA

SEQ ID NO: 279 - protein, 14 aa, Artificial Sequence
  Framework sequence
WFRQAPGKEREGVS

SEQ ID NO: 280 - protein, 14 aa, Artificial Sequence
  Framework sequence
WFRQAPGKEREGVS

SEQ ID NO: 281 - protein, 14 aa, Artificial Sequence
  Framework sequence
WFRQAPGKEREGVS

SEQ ID NO: 282 - protein, 14 aa, Artificial Sequence
  Framework sequence
WFRQAPGKEREGVS

SEQ ID NO: 283 - protein, 14 aa, Artificial Sequence
  Framework sequence
WYRQAPGKQRELVA

SEQ ID NO: 284 - protein, 14 aa, Artificial Sequence
  Framework sequence
WFRQAPGKEREGVS

SEQ ID NO: 285 - protein, 14 aa, Artificial Sequence
  Framework sequence
WFRQAPGKEREGVS

SEQ ID NO: 286 - protein, 14 aa, Artificial Sequence
  Framework sequence
WYRQAPGKQRELVA

SEQ ID NO: 287 - protein, 14 aa, Artificial Sequence
  Framework sequence
WFRQAPGKERECVA

SEQ ID NO: 288 - protein, 14 aa, Artificial Sequence
  Framework sequence
WFRQAPGKEREGVS

SEQ ID NO: 289 - protein, 14 aa, Artificial Sequence
  Framework sequence
WFRQAPGKEREGVS

SEQ ID NO: 290 - protein, 14 aa, Artificial Sequence
  Framework sequence
WFRQAPGKEREVVA

SEQ ID NO: 291 - protein, 14 aa, Artificial Sequence
  Framework sequence
WYRQAPGKQRDFLA

SEQ ID NO: 292 - protein, 14 aa, Artificial Sequence
  Framework sequence
WYRQVPGKQRELVA

SEQ ID NO: 293 - protein, 14 aa, Artificial Sequence
  Framework sequence
WYRQVPGKQRELVA

SEQ ID NO: 294 - protein, 14 aa, Artificial Sequence
  Framework sequence
WFRQAPGKEHESVS

SEQ ID NO: 295 - protein, 14 aa, Artificial Sequence
  Framework sequence
WYCQAPGKQRELVA

SEQ ID NO: 296 - protein, 14 aa, Artificial Sequence
  Framework sequence
WYRQAPGAQREFVA

SEQ ID NO: 297 - protein, 14 aa, Artificial Sequence
  Framework sequence
WFRQAPGKEREFVA

SEQ ID NO: 298 - protein, 14 aa, Artificial Sequence
  Framework sequence
WFRQAPGKEREFVA

SEQ ID NO: 299 - protein, 14 aa, Artificial Sequence
  Framework sequence
WFRQAPGKEREFVA

SEQ ID NO: 300 - protein, 14 aa, Artificial Sequence
  Framework sequence
WFRQAPGKEREFVA

SEQ ID NO: 301 - protein, 14 aa, Artificial Sequence
  Framework sequence
WHRQAPGKQRESVA

SEQ ID NO: 302 - protein, 14 aa, Artificial Sequence
  Framework sequence
WFRQAPGKEREFVA

SEQ ID NO: 303 - protein, 14 aa, Artificial Sequence
  Framework sequence
WFRQAPGKEREGVS

SEQ ID NO: 304 - protein, 14 aa, Artificial Sequence
  Framework sequence
WFRQAPGKERECVA

SEQ ID NO: 305 - protein, 14 aa, Artificial Sequence
  Framework sequence
WFRQAPGKEREFVA

SEQ ID NO: 306 - protein, 14 aa, Artificial Sequence
  Framework sequence
WYRQAPGKQRELVA

SEQ ID NO: 307 - protein, 14 aa, Artificial Sequence
  Framework sequence
WFRQAPGKEREGVS

SEQ ID NO: 308 - protein, 14 aa, Artificial Sequence
  Framework sequence
WYRQAPGEQRELVA

SEQ ID NO: 309 - protein, 14 aa, Artificial Sequence
  Framework sequence
WYRQAPGKQRELVA

SEQ ID NO: 310 - protein, 14 aa, Artificial Sequence
  Framework sequence
WYRQAPGKQRELVA

SEQ ID NO: 311 - protein, 14 aa, Artificial Sequence
  Framework sequence
WFRQAPGKEREGVS

SEQ ID NO: 312 - protein, 14 aa, Artificial Sequence
  Framework sequence
WFRQAPGKEREGVS

SEQ ID NO: 313 - protein, 14 aa, Artificial Sequence
  Framework sequence
WYRQAPGKQRELVA

SEQ ID NO: 314 - protein, 14 aa, Artificial Sequence
  Framework sequence
WFRQAPGKEREGVS

SEQ ID NO: 315 - protein, 14 aa, Artificial Sequence
  Framework sequence
WYRQAPGKQRELVA

SEQ ID NO: 316 - protein, 14 aa, Artificial Sequence
  Framework sequence
WYRQAPGKQRELVA

SEQ ID NO: 317 - protein, 14 aa, Artificial Sequence
  Framework sequence
WYRQAPGQQREWVA

SEQ ID NO: 318 - protein, 14 aa, Artificial Sequence
  Framework sequence
WFRQAPGKSRESVA

SEQ ID NO: 319 - protein, 14 aa, Artificial Sequence
  Framework sequence
WFRQAPGKEREFVA

SEQ ID NO: 320 - protein, 14 aa, Artificial Sequence
  Framework sequence
WHRQAPGQQREWVA

SEQ ID NO: 321 - protein, 14 aa, Artificial Sequence
  Framework sequence
WYRQAPGKQRDFLA

SEQ ID NO: 322 - protein, 14 aa, Artificial Sequence
  Framework sequence
WYRQAPGKQRDFLA

SEQ ID NO: 323 - protein, 14 aa, Artificial Sequence
  Framework sequence
WVRRAPGKGLEWVS

SEQ ID NO: 324 - protein, 14 aa, Artificial Sequence
  Framework sequence
WYRQAPGQQREWVA

SEQ ID NO: 325 - protein, 14 aa, Artificial Sequence
  Framework sequence
WFRQAPGKERECVA

SEQ ID NO: 326 - protein, 14 aa, Artificial Sequence
  Framework sequence
WFRQAPGKEREFVA

SEQ ID NO: 327 - protein, 14 aa, Artificial Sequence
  Framework sequence
WFRQAPGKERECVA

SEQ ID NO: 328 - protein, 14 aa, Artificial Sequence
  Framework sequence
WFRQAPGKERECVA

SEQ ID NO: 329 - protein, 14 aa, Artificial Sequence
  Framework sequence
WFRQAPGKEREGVS

SEQ ID NO: 330 - protein, 14 aa, Artificial Sequence
  Framework sequence
WFRQAPGKEREGVS

SEQ ID NO: 331 - protein, 14 aa, Artificial Sequence
  Framework sequence
WFRQRPGEEREYVA

SEQ ID NO: 332 - protein, 14 aa, Artificial Sequence
  Framework sequence
WFRQAPGKERECVA

SEQ ID NO: 333 - protein, 14 aa, Artificial Sequence
  Framework sequence
WHRQAPGKQRESVA

SEQ ID NO: 334 - protein, 14 aa, Artificial Sequence
  Framework sequence
WFRQAPGKEREFVA

SEQ ID NO: 335 - protein, 14 aa, Artificial Sequence
  Framework sequence
WFRQAPGKEREFVA

SEQ ID NO: 336 - protein, 14 aa, Artificial Sequence
  Framework sequence
WFRQAPGKEREFVA

SEQ ID NO: 337 - protein, 14 aa, Artificial Sequence
  Framework sequence
WFRQAPGKEREFVA

SEQ ID NO: 338 - protein, 14 aa, Artificial Sequence
  Framework sequence
WFRQAPGKEREFVA

SEQ ID NO: 339 - protein, 14 aa, Artificial Sequence
  Framework sequence
WFRQAPGKEREFVA

SEQ ID NO: 340 - protein, 14 aa, Artificial Sequence
  Framework sequence
WFRQAPGKEREFVA

SEQ ID NO: 341 - protein, 14 aa, Artificial Sequence
  Framework sequence
WFRQAPGKEREFVA

SEQ ID NO: 342 - protein, 14 aa, Artificial Sequence
  Framework sequence
WFRQAPGKEREFVA

SEQ ID NO: 343 - protein, 14 aa, Artificial Sequence
  Framework sequence
WFRQAPGKQREWVV

SEQ ID NO: 344 - protein, 14 aa, Artificial Sequence
  Framework sequence
WFRQAPGTEREFVA

SEQ ID NO: 345 - protein, 14 aa, Artificial Sequence
  Framework sequence
WYRQAPGKQREMVA

SEQ ID NO: 346 - protein, 14 aa, Artificial Sequence
  Framework sequence
WYRQYPGKQREWVA

SEQ ID NO: 347 - protein, 17 aa, Artificial Sequence
  CDR2 sequence
GISWSTGIAHYTDSVKG

SEQ ID NO: 348 - protein, 16 aa, Artificial Sequence
  CDR2 sequence
GIDWRGNIVDAESVKG

SEQ ID NO: 349 - protein, 16 aa, Artificial Sequence
  CDR2 sequence
GIDWRGNIVDAESVKG

SEQ ID NO: 350 - protein, 17 aa, Artificial Sequence
  CDR2 sequence
GISWSTGIAHYTDSVKG

SEQ ID NO: 351 - protein, 14 aa, Artificial Sequence
  CDR2 sequence
AIAYATHFADSVKG

SEQ ID NO: 352 - protein, 17 aa, Artificial Sequence
  CDR2 sequence
IIDTNGDNTLTVGSVKG

SEQ ID NO: 353 - protein, 14 aa, Artificial Sequence
  CDR2 sequence
AIAYATHFADSVKG

SEQ ID NO: 354 - protein, 17 aa, Artificial Sequence
  CDR2 sequence
IIDTNGDNTLIVGSVKG

SEQ ID NO: 355 - protein, 17 aa, Artificial Sequence
  CDR2 sequence
SISSNDGSTFYADSVKG

SEQ ID NO: 356 - protein, 17 aa, Artificial Sequence
  CDR2 sequence
IIDTNGDNTLTVGSVKG

SEQ ID NO: 357 - protein, 16 aa, Artificial Sequence
  CDR2 sequence
AAISGGSTNYADFVKG

SEQ ID NO: 358 - protein, 16 aa, Artificial Sequence
  CDR2 sequence
RITSGGSTVYADSVKG

SEQ ID NO: 359 - protein, 17 aa, Artificial Sequence
  CDR2 sequence
IIDTNGDNTLIVGSVKG

SEQ ID NO: 360 - protein, 17 aa, Artificial Sequence
  CDR2 sequence
SISSSNGNTYYADSVRG

SEQ ID NO: 361 - protein, 17 aa, Artificial Sequence
  CDR2 sequence
IIDTNGDNTLIVGSVKG

SEQ ID NO: 362 - protein, 17 aa, Artificial Sequence
  CDR2 sequence
SISSSNGNTYYADSVRG

SEQ ID NO: 363 - protein, 17 aa, Artificial Sequence
  CDR2 sequence
IIDTNGDNTLIVGSVKG

SEQ ID NO: 364 - protein, 17 aa, Artificial Sequence
  CDR2 sequence
SISSSNGNTYYADSVRG

SEQ ID NO: 365 - protein, 17 aa, Artificial Sequence
  CDR2 sequence
SISSSNGNTYYADSVRG

SEQ ID NO: 366 - protein, 17 aa, Artificial Sequence
  CDR2 sequence
SISSSNGNTYYADSVRG

SEQ ID NO: 367 - protein, 17 aa, Artificial Sequence
  CDR2 sequence
SISSSNGNTYYADSVRG

SEQ ID NO: 368 - protein, 16 aa, Artificial Sequence
  CDR2 sequence
RITSGGSTYYADSVKG

SEQ ID NO: 369 - protein, 17 aa, Artificial Sequence
  CDR2 sequence
CISSSDGSTYYASSVKG

SEQ ID NO: 370 - protein, 17 aa, Artificial Sequence
  CDR2 sequence
CISSTDGSTYYADSVKG

SEQ ID NO: 371 - protein, 16 aa, Artificial Sequence
  CDR2 sequence
AAISGGSTNYADFVKG

SEQ ID NO: 372 - protein, 17 aa, Artificial Sequence
  CDR2 sequence
IIDTNGDNTLIVGSVKG

SEQ ID NO: 373 - protein, 17 aa, Artificial Sequence
  CDR2 sequence
SISSSNGNTYYADSVRG

SEQ ID NO: 374 - protein, 17 aa, Artificial Sequence
  CDR2 sequence
SISSSNGNTYYADSVRG

SEQ ID NO: 375 - protein, 17 aa, Artificial Sequence
  CDR2 sequence
IIDTNGDNTLTVGSVKG

SEQ ID NO: 376 - protein, 16 aa, Artificial Sequence
  CDR2 sequence
VITDGDKTLYADSVKG

SEQ ID NO: 377 - protein, 16 aa, Artificial Sequence
  CDR2 sequence
TVRSGSITNYADSVQD

SEQ ID NO: 378 - protein, 16 aa, Artificial Sequence
  CDR2 sequence
TVRSGSITNYADSVQD

SEQ ID NO: 379 - protein, 17 aa, Artificial Sequence
  CDR2 sequence
AISSDGGSEYYAGSVKG

SEQ ID NO: 380 - protein, 16 aa, Artificial Sequence
  CDR2 sequence
SISSGGGINYADSVKG

SEQ ID NO: 381 - protein, 16 aa, Artificial Sequence
  CDR2 sequence
GVGLDGTPNYADSVKG

SEQ ID NO: 382 - protein, 17 aa, Artificial Sequence
  CDR2 sequence
IIRGNPSRTYHSDSVKG

SEQ ID NO: 383 - protein, 17 aa, Artificial Sequence
  CDR2 sequence
TITFSGARTHYSDSVRD

SEQ ID NO: 384 - protein, 17 aa, Artificial Sequence
  CDR2 sequence
IIRGNPSRTYHSDSVKG

SEQ ID NO: 385 - protein, 17 aa, Artificial Sequence
  CDR2 sequence
SILWDGSITYYADSVKD

SEQ ID NO: 386 - protein, 16 aa, Artificial Sequence
  CDR2 sequence
SITSGGMRNYADSVKD

SEQ ID NO: 387 - protein, 17 aa, Artificial Sequence
  CDR2 sequence
VIDTNGGHTLTVGSVKG

SEQ ID NO: 388 - protein, 17 aa, Artificial Sequence
  CDR2 sequence
SISSSNGNTYYADSVRG

SEQ ID NO: 389 - protein, 17 aa, Artificial Sequence
  CDR2 sequence
IIDTNGDNTLIVGSVKG

SEQ ID NO: 390 - protein, 14 aa, Artificial Sequence
  CDR2 sequence
AIAYATHFADSVKG

SEQ ID NO: 391 - protein, 16 aa, Artificial Sequence
  CDR2 sequence
SITSGGSTTYADSVKG

SEQ ID NO: 392 - protein, 17 aa, Artificial Sequence
  CDR2 sequence
SISSSNGNTYYADSVRG

SEQ ID NO: 393 - protein, 16 aa, Artificial Sequence
  CDR2 sequence
AAISGGSTNYADFVKG

SEQ ID NO: 394 - protein, 16 aa, Artificial Sequence
  CDR2 sequence
AAISGGSTNYADFVKG

SEQ ID NO: 395 - protein, 16 aa, Artificial Sequence
  CDR2 sequence
RITSGGSTYYADSVKG

SEQ ID NO: 396 - protein, 17 aa, Artificial Sequence
  CDR2 sequence
SISSSNGNTYYADSVRG

SEQ ID NO: 397 - protein, 17 aa, Artificial Sequence
  CDR2 sequence
SISSSNGNTYYADSVRG

SEQ ID NO: 398 - protein, 16 aa, Artificial Sequence
  CDR2 sequence
AAISGGSTNYADFVKG

SEQ ID NO: 399 - protein, 17 aa, Artificial Sequence
  CDR2 sequence
CMISSDGSTYYADSVKG

SEQ ID NO: 400 - protein, 16 aa, Artificial Sequence
  CDR2 sequence
AAISGGSTNYADFVKG

SEQ ID NO: 401 - protein, 16 aa, Artificial Sequence
  CDR2 sequence
AAISGGSTNYADFVKG

SEQ ID NO: 402 - protein, 16 aa, Artificial Sequence
  CDR2 sequence
VITDTDSTIYPDSVKG

SEQ ID NO: 403 - protein, 16 aa, Artificial Sequence
  CDR2 sequence
RISPSGNTFYQDSVRG

SEQ ID NO: 404 - protein, 17 aa, Artificial Sequence
  CDR2 sequence
RIFTDDGDSYYADSVQG

SEQ ID NO: 405 - protein, 16 aa, Artificial Sequence
  CDR2 sequence
VITDTDSTIYPDSVKG

SEQ ID NO: 406 - protein, 16 aa, Artificial Sequence
  CDR2 sequence
VITDGDKTLYADSVKG

SEQ ID NO: 407 - protein, 16 aa, Artificial Sequence
  CDR2 sequence
IITDGSKTLYADSVKG

SEQ ID NO: 408 - protein, 17 aa, Artificial Sequence
  CDR2 sequence
AINSDGTGSSYAPFVTG

SEQ ID NO: 409 - protein, 16 aa, Artificial Sequence
  CDR2 sequence
VITDTDSTIYPDSVKG

SEQ ID NO: 410 - protein, 17 aa, Artificial Sequence
  CDR2 sequence
VIDTNGDNTLTVGSVKG

SEQ ID NO: 411 - protein, 14 aa, Artificial Sequence
  CDR2 sequence
AISIVTDYADSVKG

SEQ ID NO: 412 - protein, 17 aa, Artificial Sequence
  CDR2 sequence
VIDTNGDNTLTVGSVKG

SEQ ID NO: 413 - protein, 17 aa, Artificial Sequence
  CDR2 sequence
VIDTNGDNTLTVGSVKG

SEQ ID NO: 414 - protein, 17 aa, Artificial Sequence
  CDR2 sequence
GISSSDGNTYYADSVKG

SEQ ID NO: 415 - protein, 17 aa, Artificial Sequence
  CDR2 sequence
GISSSDGNTYYADSVKG

SEQ ID NO: 416 - protein, 17 aa, Artificial Sequence
  CDR2 sequence
VISWNNNYIHYRDSVKG

SEQ ID NO: 417 - protein, 17 aa, Artificial Sequence
  CDR2 sequence
VIDTNGDNTLTVGSVKG

SEQ ID NO: 418 - protein, 16 aa, Artificial Sequence
  CDR2 sequence
SITSGGMRNYADSVKD

SEQ ID NO: 419 - protein, 17 aa, Artificial Sequence
  CDR2 sequence
TITFSGARTHYSDSVRD

SEQ ID NO: 420 - protein, 17 aa, Artificial Sequence
  CDR2 sequence
IITFNGARTHYSDSVRD

SEQ ID NO: 421 - protein, 17 aa, Artificial Sequence
  CDR2 sequence
TITFSGARTHYSDSVRD

SEQ ID NO: 422 - protein, 17 aa, Artificial Sequence
  CDR2 sequence
TITFSGARTHYSDSVRD

SEQ ID NO: 423 - protein, 17 aa, Artificial Sequence
  CDR2 sequence
TITFSGARTHYSDSVRD

SEQ ID NO: 424 - protein, 17 aa, Artificial Sequence
  CDR2 sequence
IITFNGARTHYSDSVRD

SEQ ID NO: 425 - protein, 17 aa, Artificial Sequence
  CDR2 sequence
TITFSGARTHYSDSVRD

SEQ ID NO: 426 - protein, 17 aa, Artificial Sequence
  CDR2 sequence
VISWSGAYTEYADSVKG

SEQ ID NO: 427 - protein, 17 aa, Artificial Sequence
  CDR2 sequence
TITFSGARTHYSDSVRD

SEQ ID NO: 428 - protein, 16 aa, Artificial Sequence
  CDR2 sequence
GISSGGSTHYADSVKG

SEQ ID NO: 429 - protein, 17 aa, Artificial Sequence
  CDR2 sequence
AITWSGDMSVYAEFVKG

SEQ ID NO: 430 - protein, 16 aa, Artificial Sequence
  CDR2 sequence
GVSRGGMTSYADSVKG

SEQ ID NO: 431 - protein, 16 aa, Artificial Sequence
  CDR2 sequence
GISRGGTTGYTDSVKG

SEQ ID NO: 432 - protein, 32 aa, Artificial Sequence
  Framework 3 sequence
RFTISRDNAKNTGSLQMNSLKPEDTAVYYCAV

SEQ ID NO: 433 - protein, 32 aa, Artificial Sequence
  Framework 3 sequence
RFTISRENAKNTLYLQMNHLKPEDTAVYYCAA

SEQ ID NO: 434 - protein, 32 aa, Artificial Sequence; identical to SEQ ID NO: 433
  Framework 3 sequence

SEQ ID NO: 435 - protein, 32 aa, Artificial Sequence; identical to SEQ ID NO: 432
  Framework 3 sequence

SEQ ID NO: 436 - protein, 32 aa, Artificial Sequence
  Framework 3 sequence
RFTISRGNAKNTVYLQMNSLKPEDTAVYYCAA

SEQ ID NO: 437 - protein, 32 aa, Artificial Sequence
  Framework 3 sequence
RFAISSDNAKNTVYLQMNSLLPEDTAVYTCAA

SEQ ID NO: 438 - protein, 32 aa, Artificial Sequence
  Framework 3 sequence
RFTISRGNAKNTVYLQMNSLKPEDAAVYYCAA

SEQ ID NO: 439 - protein, 32 aa, Artificial Sequence; identical to SEQ ID NO: 437
  Framework 3 sequence

SEQ ID NO: 440 - protein, 32 aa, Artificial Sequence
  Framework 3 sequence
RFTISRDKAKNTVYLQMNSLKPEDTAVYYCAA

SEQ ID NO: 441 - protein, 32 aa, Artificial Sequence; identical to SEQ ID NO: 437
  Framework 3 sequence

SEQ ID NO: 442 - protein, 32 aa, Artificial Sequence
  Framework 3 sequence
RFTISRDNAKNTVYLQMNSLKPEDTAVYYCNA

SEQ ID NO: 443 - protein, 32 aa, Artificial Sequence
  Framework 3 sequence
RFTISRDNAKNTVYLQMNSLKPEDATVYYCNA

SEQ ID NO: 444 - protein, 32 aa, Artificial Sequence; identical to SEQ ID NO: 437
  Framework 3 sequence

SEQ ID NO: 445 - protein, 32 aa, Artificial Sequence
  Framework 3 sequence
RFTISSDNAKNTVYLQMNSLKPEDTGVYYCAA

SEQ ID NO: 446 - protein, 32 aa, Artificial Sequence; identical to SEQ ID NO: 437
  Framework 3 sequence

SEQ ID NO: 447 - protein, 32 aa, Artificial Sequence
  Framework 3 sequence
RFTISSDNAKNTVYLQMNSLKPEDAGVYYCAA

SEQ ID NO: 448 - protein, 32 aa, Artificial Sequence; identical to SEQ ID NO: 437
  Framework 3 sequence

SEQ ID NO: 449 - protein, 32 aa, Artificial Sequence; identical to SEQ ID NO: 445
  Framework 3 sequence

SEQ ID NO: 450 - protein, 32 aa, Artificial Sequence; identical to SEQ ID NO: 445
  Framework 3 sequence

SEQ ID NO: 451 - protein, 32 aa, Artificial Sequence; identical to SEQ ID NO: 445
  Framework 3 sequence

SEQ ID NO: 452 - protein, 32 aa, Artificial Sequence; identical to SEQ ID NO: 445
  Framework 3 sequence

SEQ ID NO: 453 - protein, 32 aa, Artificial Sequence
  Framework 3 sequence
RFTISRDNAKNTVYLQMNSLKPEDTAVFYCNA

SEQ ID NO: 454 - protein, 32 aa, Artificial Sequence
  Framework 3 sequence
RFTVSRDKAKNTVYLQMNSLKPEDTAVYYCAF

SEQ ID NO: 455 - protein, 32 aa, Artificial Sequence
  Framework 3 sequence
RFTISRDNAKNTVYLQMNSLNPEDTGVYTCAA

SEQ ID NO: 456 - protein, 32 aa, Artificial Sequence; identical to SEQ ID NO: 442
  Framework 3 sequence

SEQ ID NO: 457 - protein, 32 aa, Artificial Sequence; identical to SEQ ID NO: 437
  Framework 3 sequence

SEQ ID NO: 458 - protein, 32 aa, Artificial Sequence; identical to SEQ ID NO: 445
  Framework 3 sequence

SEQ ID NO: 459 - protein, 32 aa, Artificial Sequence; identical to SEQ ID NO: 445
  Framework 3 sequence

SEQ ID NO: 460 - protein, 32 aa, Artificial Sequence; identical to SEQ ID NO: 437
  Framework 3 sequence

SEQ ID NO: 461 - protein, 32 aa, Artificial Sequence
  Framework 3 sequence
RFTISNDNAKNTVYLQMNSLKPEDTAVYYCNA

SEQ ID NO: 462 - protein, 32 aa, Artificial Sequence
  Framework 3 sequence
QFTITRDIDENTVYLQMNSLKPEDTAVYYCLT

SEQ ID NO: 463 - protein, 32 aa, Artificial Sequence
  Framework 3 sequence
RFTITRDIDENTVYLQMNSLKPEDTAVYYCLT

SEQ ID NO: 464 - protein, 32 aa, Artificial Sequence
  Framework 3 sequence
RFTISRDNAKNTVYLQMNSLKPEDTAVYYCAA

SEQ ID NO: 465 - protein, 32 aa, Artificial Sequence
  Framework 3 sequence
RFTISRDYAENSVDLQMNSLKPEDTAVYYCNA

SEQ ID NO: 466 - protein, 32 aa, Artificial Sequence
  Framework 3 sequence
RFTISRDNTKNTVSLQMENLKPEDTGVYYCNI

SEQ ID NO: 467 - protein, 32 aa, Artificial Sequence
  Framework 3 sequence
RFTASRDNAKNTVYLQMNRLEPEDTAVYYCAA

SEQ ID NO: 468 - protein, 32 aa, Artificial Sequence
  Framework 3 sequence
RFTISRDNAKNTVYLQMDSLKSEDTAVYYCAA

SEQ ID NO: 469 - protein, 32 aa, Artificial Sequence; identical to SEQ ID NO: 467
  Framework 3 sequence

SEQ ID NO: 470 - protein, 32 aa, Artificial Sequence
  Framework 3 sequence
RFTISRDISRKTLYLQMNSLRPEDTATYTCAR

SEQ ID NO: 471 - protein, 32 aa, Artificial Sequence
  Framework 3 sequence
RFTISKDNAKNTVYLQMNGLKPDDTAVYYCGL

SEQ ID NO: 472 - protein, 32 aa, Artificial Sequence
  Framework 3 sequence
RFAISSDNAKNTVYLQMNSLVPEDTAVYTCAA

SEQ ID NO: 473 - protein, 32 aa, Artificial Sequence; identical to SEQ ID NO: 445
  Framework 3 sequence

SEQ ID NO: 474 - protein, 32 aa, Artificial Sequence; identical to SEQ ID NO: 437
  Framework 3 sequence

SEQ ID NO: 475 - protein, 32 aa, Artificial Sequence; identical to SEQ ID NO: 436
  Framework 3 sequence

SEQ ID NO: 476 - protein, 32 aa, Artificial Sequence
  Framework 3 sequence
RFTISRDNAKDTVYLQMNSLKPEDTAVYYCNA

SEQ ID NO: 477 - protein, 32 aa, Artificial Sequence; identical to SEQ ID NO: 445
  Framework 3 sequence

SEQ ID NO: 478 - protein, 32 aa, Artificial Sequence; identical to SEQ ID NO: 442
  Framework 3 sequence

SEQ ID NO: 479 - protein, 32 aa, Artificial Sequence; identical to SEQ ID NO: 442
  Framework 3 sequence

SEQ ID NO: 480 - protein, 32 aa, Artificial Sequence; identical to SEQ ID NO: 453
  Framework 3 sequence

SEQ ID NO: 481 - protein, 32 aa, Artificial Sequence
  Framework 3 sequence
RFTISSDNAKNTVYLQMNGLKPEDTGVYYCAA

SEQ ID NO: 482 - protein, 32 aa, Artificial Sequence; identical to SEQ ID NO: 447
  Framework 3 sequence

SEQ ID NO: 483 - protein, 32 aa, Artificial Sequence; identical to SEQ ID NO: 442
  Framework 3 sequence

SEQ ID NO: 484 - protein, 32 aa, Artificial Sequence
  Framework 3 sequence
RFTISSDNAKNTVYLQMDSLKPEDTAVYYCAA

SEQ ID NO: 485 - protein, 32 aa, Artificial Sequence
  Framework 3 sequence
RFTISRDNAKNTVYLQMNSLKPGDTAVYYCNA

SEQ ID NO: 486 - protein, 32 aa, Artificial Sequence; identical to SEQ ID NO: 442
  Framework 3 sequence

SEQ ID NO: 487 - protein, 32 aa, Artificial Sequence
  Framework 3 sequence
RFAISRDGAKNTVHLRMSSLKPEDTAVYYCNA

SEQ ID NO: 488 - protein, 32 aa, Artificial Sequence
  Framework 3 sequence
RFTISTDNAKNTVYLQMNNLKPEDTAVYYCAA

SEQ ID NO: 489 - protein, 32 aa, Artificial Sequence
  Framework 3 sequence
RFTISGDNAKNTVYLQMNSLKPEDTGVYFCAA

SEQ ID NO: 490 - protein, 32 aa, Artificial Sequence; identical to SEQ ID NO: 487
  Framework 3 sequence

SEQ ID NO: 491 - protein, 32 aa, Artificial Sequence; identical to SEQ ID NO: 461
  Framework 3 sequence

SEQ ID NO: 492 - protein, 32 aa, Artificial Sequence; identical to SEQ ID NO: 461
  Framework 3 sequence

SEQ ID NO: 493 - protein, 32 aa, Artificial Sequence
  Framework 3 sequence
RFTASRDNAKNTLYLQMNSLKPEDTAVYYCTN

SEQ ID NO: 494 - protein, 32 aa, Artificial Sequence; identical to SEQ ID NO: 487
  Framework 3 sequence

SEQ ID NO: 495 - protein, 32 aa, Artificial Sequence
  Framework 3 sequence
RFAISRDNAKNTVYLQMNSLLPEDTAVYTCAA

SEQ ID NO: 496 - protein, 32 aa, Artificial Sequence
  Framework 3 sequence
RFNISRDNRENTVYLQMNSLKPEDTAVYYCAA

SEQ ID NO: 497 - protein, 32 aa, Artificial Sequence; identical to SEQ ID NO: 495
  Framework 3 sequence

SEQ ID NO: 498 - protein, 32 aa, Artificial Sequence; identical to SEQ ID NO: 495
  Framework 3 sequence

SEQ ID NO: 499 - protein, 32 aa, Artificial Sequence
  Framework 3 sequence
RFTISSDNAKNTVYLQMNSLKPEDTAVYYCAA

SEQ ID NO: 500 - protein, 32 aa, Artificial Sequence; identical to SEQ ID NO: 499
  Framework 3 sequence

SEQ ID NO: 501 - protein, 32 aa, Artificial Sequence
  Framework 3 sequence
RFTASRDTSENRMYLQMNGLKPEDTAVYYCAA

SEQ ID NO: 502 - protein, 32 aa, Artificial Sequence; identical to SEQ ID NO: 495
  Framework 3 sequence

SEQ ID NO: 503 - protein, 32 aa, Artificial Sequence; identical to SEQ ID NO: 471
  Framework 3 sequence

SEQ ID NO: 504 - protein, 32 aa, Artificial Sequence
  Framework 3 sequence
RFTISRDNAKNTVYLQMNSLKSEDTAVYYCAA

SEQ ID NO: 505 - protein, 32 aa, Artificial Sequence; identical to SEQ ID NO: 504
  Framework 3 sequence

SEQ ID NO: 506 - protein, 32 aa, Artificial Sequence; identical to SEQ ID NO: 504
  Framework 3 sequence

SEQ ID NO: 507 - protein, 32 aa, Artificial Sequence; identical to SEQ ID NO: 504
  Framework 3 sequence

SEQ ID NO: 508 - protein, 32 aa, Artificial Sequence; identical to SEQ ID NO: 504
  Framework 3 sequence

SEQ ID NO: 509 - protein, 32 aa, Artificial Sequence; identical to SEQ ID NO: 504
  Framework 3 sequence

SEQ ID NO: 510 - protein, 32 aa, Artificial Sequence; identical to SEQ ID NO: 504
  Framework 3 sequence

SEQ ID NO: 511 - protein, 32 aa, Artificial Sequence
  Framework 3 sequence
RFTISRNNAANTGALQMNSLKLEDTAVYYCAA

SEQ ID NO: 512 - protein, 32 aa, Artificial Sequence; identical to SEQ ID NO: 504
  Framework 3 sequence

SEQ ID NO: 513 - protein, 32 aa, Artificial Sequence
  Framework 3 sequence
RFISSQDDAKNTVYLQMNSLKPEDTAIYYCAI

SEQ ID NO: 514 - protein, 32 aa, Artificial Sequence
  Framework 3 sequence
RFTVSRDNAKSVVYLQMNRLKPEDTSVYYCAG

SEQ ID NO: 515 - protein, 32 aa, Artificial Sequence
  Framework 3 sequence
RLTISRDNAKNSVYLQMNSLNPEDTAVYYCSA

SEQ ID NO: 516 - protein, 32 aa, Artificial Sequence
  Framework 3 sequence
RFTISRDNAKNTVYLQMNSLKPEDTAVYYCAI

SEQ ID NO: 517 - protein, 10 aa, Artificial Sequence
  CDR3 sequence
VQTTKGNYDY

SEQ ID NO: 518 - protein, 15 aa, Artificial Sequence
  CDR3 sequence
SSVFSDLRYRKNPKY

SEQ ID NO: 519 - protein, 15 aa, Artificial Sequence
  CDR3 sequence
SSVFSDLRYRKNPKY

SEQ ID NO: 520 - protein, 10 aa, Artificial Sequence
  CDR3 sequence
VQTTKGNYDY

SEQ ID NO: 521 - protein, 17 aa, Artificial Sequence
  CDR3 sequence
DLSLSKMVSKITSDMDY

SEQ ID NO: 522 - protein, 13 aa, Artificial Sequence
  CDR3 sequence
GAWSALRRSVANY

SEQ ID NO: 523 - protein, 17 aa, Artificial Sequence
  CDR3 sequence
DLSLSKMVSKITSDMDY

SEQ ID NO: 524 - protein, 13 aa, Artificial Sequence
  CDR3 sequence
GVWSSLRHTAANY

SEQ ID NO: 525 - protein, 19 aa, Artificial Sequence
  CDR3 sequence
TYLTAQAVGVPVAYYEFDY

SEQ ID NO: 526 - protein, 13 aa, Artificial Sequence
  CDR3 sequence
GAWSALRRSVANY

SEQ ID NO: 527 - protein, 17 aa, Artificial Sequence
  CDR3 sequence
LVVSHNYSDYVPFPDDY

SEQ ID NO: 528 - protein, 13 aa, Artificial Sequence
  CDR3 sequence
IVTYSDYDLGNDY

SEQ ID NO: 529 - protein, 13 aa, Artificial Sequence
  CDR3 sequence
GVWSSLRHTAANY

SEQ ID NO: 530 - protein, 17 aa, Artificial Sequence
  CDR3 sequence
IWGIFFNEKMPVGAYDY

SEQ ID NO: 531 - protein, 13 aa, Artificial Sequence
  CDR3 sequence
GVWSSLRHTAANY

SEQ ID NO: 532 - protein, 17 aa, Artificial Sequence
  CDR3 sequence
IWGIFFNEKMPVGAYDY

SEQ ID NO: 533 - protein, 13 aa, Artificial Sequence
  CDR3 sequence
GVWSSLRHTAANY

SEQ ID NO: 534 - protein, 17 aa, Artificial Sequence
  CDR3 sequence
IWGIFFNEKMPVGAYDY

SEQ ID NO: 535 - protein, 17 aa, Artificial Sequence
  CDR3 sequence
IWGIFFNEKMPVGAYDY

SEQ ID NO: 536 - protein, 17 aa, Artificial Sequence
  CDR3 sequence
IWGIFFNEKMPVGAYDY

SEQ ID NO: 537 - protein, 17 aa, Artificial Sequence
  CDR3 sequence
IWGIFFNEKMPVGAYDY

SEQ ID NO: 538 - protein, 13 aa, Artificial Sequence
  CDR3 sequence
IVTDSDYDLGNDY

SEQ ID NO: 539 - protein, 19 aa, Artificial Sequence
  CDR3 sequence
VFTTAQAMGVPNNPYEYDF

SEQ ID NO: 540 - protein, 19 aa, Artificial Sequence
  CDR3 sequence
VLTTAQAMGVPTRSYEYDY

SEQ ID NO: 541 - protein, 17 aa, Artificial Sequence
  CDR3 sequence
LVVSHNYSDYVPFPDDY

SEQ ID NO: 542 - protein, 13 aa, Artificial Sequence
  CDR3 sequence
GVWSSLRHTAANY

SEQ ID NO: 543 - protein, 17 aa, Artificial Sequence
  CDR3 sequence
IWGIFFNEKMPVGAYDY

SEQ ID NO: 544 - protein, 17 aa, Artificial Sequence
  CDR3 sequence
IWGIFFNEKMPVGAYDY

SEQ ID NO: 545 - protein, 13 aa, Artificial Sequence
  CDR3 sequence
GAWSALRRSVANY

SEQ ID NO: 546 - protein, 8 aa, Artificial Sequence
  CDR3 sequence
YQAGWGDY

SEQ ID NO: 547 - protein, 12 aa, Artificial Sequence
  CDR3 sequence
RASVPGRGYQDY

SEQ ID NO: 548 - protein, 12 aa, Artificial Sequence
  CDR3 sequence
RASVPGRGYQDY

SEQ ID NO: 549 - protein, 14 aa, Artificial Sequence
  CDR3 sequence
DPRRIGANIKYSDY

SEQ ID NO: 550 - protein, 16 aa, Artificial Sequence
  CDR3 sequence
RGTYLNGDHYSTNYNS

SEQ ID NO: 551 - protein, 13 aa, Artificial Sequence
  CDR3 sequence
DEGMDYDGNFYDR

SEQ ID NO: 552 - protein, 17 aa, Artificial Sequence
  CDR3 sequence
DPPPFASDYSAPQSYDY

SEQ ID NO: 553 - protein, 19 aa, Artificial Sequence
  CDR3 sequence
STKYYSSTYNYIHPAFYDI

SEQ ID NO: 554 - protein, 17 aa, Artificial Sequence
  CDR3 sequence
DPPPFASDYSAPQSYDY

SEQ ID NO: 555 - protein, 16 aa, Artificial Sequence
  CDR3 sequence
GIYFSRRYVDPGIYGT

SEQ ID NO: 556 - protein, 11 aa, Artificial Sequence
  CDR3 sequence
GRYEGGVWRDY

SEQ ID NO: 557 - protein, 13 aa, Artificial Sequence
  CDR3 sequence
GAWSSLRKTAASY

SEQ ID NO: 558 - protein, 17 aa, Artificial Sequence
  CDR3 sequence
IWGIFFNEKMPVGAYDY

SEQ ID NO: 559 - protein, 13 aa, Artificial Sequence
  CDR3 sequence
GVWSSLRHTAANY

SEQ ID NO: 560 - protein, 17 aa, Artificial Sequence
  CDR3 sequence
DLSLSKMVSKITSDMDY

SEQ ID NO: 561 - protein, 10 aa, Artificial Sequence
  CDR3 sequence
HIRFPFPNDY

SEQ ID NO: 562 - protein, 17 aa, Artificial Sequence
  CDR3 sequence
IWGIFFNEKMPVGAYDY

SEQ ID NO: 563 - protein, 17 aa, Artificial Sequence
  CDR3 sequence
LVVSHNYSDYVPFPDDY

SEQ ID NO: 564 - protein, 17 aa, Artificial Sequence
  CDR3 sequence
LVVSHNYSDYVPFPDDY

SEQ ID NO: 565 - protein, 13 aa, Artificial Sequence
  CDR3 sequence
IVTDSDYDLGNDY

SEQ ID NO: 566 - protein, 17 aa, Artificial Sequence
  CDR3 sequence
IWGIFFNEKMPVGAYDY

SEQ ID NO: 567 - protein, 17 aa, Artificial Sequence
  CDR3 sequence
IWGIFFNEKMPVGAYDY

SEQ ID NO: 568 - protein, 17 aa, Artificial Sequence
  CDR3 sequence
LVVSHNYSDYVPFPDDY

SEQ ID NO: 569 - protein, 19 aa, Artificial Sequence
  CDR3 sequence
DLSLYGCYVGDRDLYDYDY

SEQ ID NO: 570 - protein, 17 aa, Artificial Sequence
  CDR3 sequence
LVVSHNYSDYVPFPDDY

SEQ ID NO: 571 - protein, 17 aa, Artificial Sequence
  CDR3 sequence
LVVSHNYSDYVPFPDDY

SEQ ID NO: 572 - protein, 8 aa, Artificial Sequence
  CDR3 sequence
YQAGWGDY

SEQ ID NO: 573 - protein, 10 aa, Artificial Sequence
  CDR3 sequence
NVGVTGSYEY

SEQ ID NO: 574 - protein, 14 aa, Artificial Sequence
  CDR3 sequence
GYMSGAESPIGYDN

SEQ ID NO: 575 - protein, 8 aa, Artificial Sequence
  CDR3 sequence
YQAGWGDY

SEQ ID NO: 576 - protein, 8 aa, Artificial Sequence
  CDR3 sequence
YQAGWGDY

SEQ ID NO: 577 - protein, 8 aa, Artificial Sequence
  CDR3 sequence
YQAGWGDY

SEQ ID NO: 578 - protein, 12 aa, Artificial Sequence
  CDR3 sequence
SNRYDYADFSAV

SEQ ID NO: 579 - protein, 8 aa, Artificial Sequence
  CDR3 sequence
YQAGWGDY

SEQ ID NO: 580 - protein, 13 aa, Artificial Sequence
  CDR3 sequence
GAWSSLRSTAANY

SEQ ID NO: 581 - protein, 18 aa, Artificial Sequence
  CDR3 sequence
NTYYSGAYFPRGHEWYEY

SEQ ID NO: 582 - protein, 13 aa, Artificial Sequence
  CDR3 sequence
GAWSSLRSTAANY

SEQ ID NO: 583 - protein, 13 aa, Artificial Sequence
  CDR3 sequence
GAWSSLRSTAANY

SEQ ID NO: 584 - protein, 18 aa, Artificial Sequence
  CDR3 sequence
EPPDSSWYLDGSPEFFKY

SEQ ID NO: 585 - protein, 18 aa, Artificial Sequence
  CDR3 sequence
EPPDSSWYLDGSPEFFKY

SEQ ID NO: 586 - protein, 16 aa, Artificial Sequence
  CDR3 sequence
RTKDNTLFTPAEEYDY

SEQ ID NO: 587 - protein, 13 aa, Artificial Sequence
  CDR3 sequence
GAWSSLRSTAANY

SEQ ID NO: 588 - protein, 11 aa, Artificial Sequence
  CDR3 sequence
GRYEGGVWRDY

SEQ ID NO: 589 - protein, 19 aa, Artificial Sequence
  CDR3 sequence
STKYYSSTYNYIHPAFYDI

SEQ ID NO: 590 - protein, 19 aa, Artificial Sequence
  CDR3 sequence
STKYYSSTYNYIHPAFYDI

SEQ ID NO: 591 - protein, 19 aa, Artificial Sequence
  CDR3 sequence
STKYYSSTYNYIHPAFYDI

SEQ ID NO: 592 - protein, 19 aa, Artificial Sequence
  CDR3 sequence
STKYYSSTYNYIHPAFYDI

SEQ ID NO: 593 - protein, 19 aa, Artificial Sequence
  CDR3 sequence
STKYYSSTYNYIHPAFYDI

SEQ ID NO: 594 - protein, 19 aa, Artificial Sequence
  CDR3 sequence
STKYYSSTYNYIHPAFYDI

SEQ ID NO: 595 - protein, 19 aa, Artificial Sequence
  CDR3 sequence
STKYYSSTYNYIHPAFYDI

SEQ ID NO: 596 - protein, 14 aa, Artificial Sequence
  CDR3 sequence
TMVPRAMVVDEFEY

SEQ ID NO: 597 - protein, 19 aa, Artificial Sequence
  CDR3 sequence
STKYYSSTYNYIHPAFYDI

SEQ ID NO: 598 - protein, 9 aa, Artificial Sequence
  CDR3 sequence
AHGSSTYNY

SEQ ID NO: 599 - protein, 10 aa, Artificial Sequence
  CDR3 sequence
DIRGRENFGS

SEQ ID NO: 600 - protein, 11 aa, Artificial Sequence
  CDR3 sequence
YYRYGSSVPQY

SEQ ID NO: 601 - protein, 8 aa, Artificial Sequence
  CDR3 sequence
PTENQPDH

SEQ ID NO: 602 - protein, 11 aa, Artificial Sequence
  Framework sequence
WGQGTQVTVSS

SEQ ID NO: 603 - protein, 11 aa, Artificial Sequence
  Framework sequence
WGQGTQVTVSS

SEQ ID NO: 604 - protein, 11 aa, Artificial Sequence
  Framework sequence
WGQGTQVTVSS

SEQ ID NO: 605 - protein, 11 aa, Artificial Sequence
  Framework sequence
WGQGTQVTVSS

SEQ ID NO: 606 - protein, 11 aa, Artificial Sequence
  Framework sequence
WGKGTLVTVSS

SEQ ID NO: 607 - protein, 11 aa, Artificial Sequence
  Framework sequence
WGQGTQVTVSS

SEQ ID NO: 608 - protein, 11 aa, Artificial Sequence
  Framework sequence
WGKGTLVTVSS

SEQ ID NO: 609 - protein, 11 aa, Artificial Sequence
  Framework sequence
WGQGTQVTVSS

SEQ ID NO: 610 - protein, 11 aa, Artificial Sequence
  Framework sequence
WGQGTQVTVSS

SEQ ID NO: 611 - protein, 11 aa, Artificial Sequence
  Framework sequence
WGQGTQVTVSS

SEQ ID NO: 612 - protein, 11 aa, Artificial Sequence
  Framework sequence
WGQGTQVTVSS

SEQ ID NO: 613 - protein, 11 aa, Artificial Sequence
  Framework sequence
WGQGTQVTVSS

SEQ ID NO: 614 - protein, 11 aa, Artificial Sequence
  Framework sequence
WGQGTQVTVSS

SEQ ID NO: 615 - protein, 11 aa, Artificial Sequence
  Framework sequence
WGQGTQVTVSS

SEQ ID NO: 616 - protein, 11 aa, Artificial Sequence
  Framework sequence
WGQGTQVTVSS

SEQ ID NO: 617 - protein, 11 aa, Artificial Sequence
  Framework sequence
WGQGTQVTVSS

SEQ ID NO: 618 - protein, 11 aa, Artificial Sequence
  Framework sequence
WGQGTQVTVSS

SEQ ID NO: 619 - protein, 11 aa, Artificial Sequence
  Framework sequence
WGQGTQVTVSS

SEQ ID NO: 620 - protein, 11 aa, Artificial Sequence
  Framework sequence
WGQGTQVTVSS

SEQ ID NO: 621 - protein, 11 aa, Artificial Sequence
  Framework sequence
WGQGTQVTVSS

SEQ ID NO: 622 - protein, 11 aa, Artificial Sequence
  Framework sequence
WGQGTQVTVSS

SEQ ID NO: 623 - protein, 11 aa, Artificial Sequence
  Framework sequence
WGQGTQVTVSS

SEQ ID NO: 624 - protein, 11 aa, Artificial Sequence
  Framework sequence
WGQGTQVTVSS

SEQ ID NO: 625 - protein, 11 aa, Artificial Sequence
  Framework sequence
WGQGTQVTVSS

SEQ ID NO: 626 - protein, 11 aa, Artificial Sequence
  Framework sequence
WGQGTQVTVSS

SEQ ID NO: 627 - protein, 11 aa, Artificial Sequence
  Framework sequence
WGQGTQVTVSS

SEQ ID NO: 628 - protein, 11 aa, Artificial Sequence
  Framework sequence
WGQGTQVTVSS

SEQ ID NO: 629 - protein, 11 aa, Artificial Sequence
  Framework sequence
WGQGTQVTVSS

SEQ ID NO: 630 - protein, 11 aa, Artificial Sequence
  Framework sequence
WGQGTQVTVSS

SEQ ID NO: 631 - protein, 11 aa, Artificial Sequence
  Framework sequence
WGQGTQVTVSS

SEQ ID NO: 632 - protein, 11 aa, Artificial Sequence
  Framework sequence
WGQGTQVTVSS

SEQ ID NO: 633 - protein, 11 aa, Artificial Sequence
  Framework sequence
WGQGTQVTVSS

SEQ ID NO: 634 - protein, 11 aa, Artificial Sequence
  Framework sequence
WGQGTQVTVSS

SEQ ID NO: 635 - protein, 11 aa, Artificial Sequence
  Framework sequence
WGQGTQVTVSS

SEQ ID NO: 636 - protein, 11 aa, Artificial Sequence
  Framework sequence
WGQGTQVTVSS

SEQ ID NO: 637 - protein, 11 aa, Artificial Sequence
  Framework sequence
WGQGTQVTVSS

SEQ ID NO: 638 - protein, 11 aa, Artificial Sequence
  Framework sequence
WGQGTQVTVSS

SEQ ID NO: 639 - protein, 11 aa, Artificial Sequence
  Framework sequence
WGQGTQVTVSS

SEQ ID NO: 640 - protein, 11 aa, Artificial Sequence
  Framework sequence
WGQGTQVTVSS

SEQ ID NO: 641 - protein, 11 aa, Artificial Sequence
  Framework sequence
WGQGTQVTVSS

SEQ ID NO: 642 - protein, 11 aa, Artificial Sequence
  Framework sequence
WGQGTQVTVSS

SEQ ID NO: 643 - protein, 11 aa, Artificial Sequence
  Framework sequence
WGQGTQVTVSS

SEQ ID NO: 644 - protein, 11 aa, Artificial Sequence
  Framework sequence
WGQGTQVTVSS

SEQ ID NO: 645 - protein, 11 aa, Artificial Sequence
  Framework sequence
WGKGTLVTVSS

SEQ ID NO: 646 - protein, 11 aa, Artificial Sequence
  Framework sequence
WGQGTQVTVSS

SEQ ID NO: 647 - protein, 11 aa, Artificial Sequence
  Framework sequence
WGQGTQVTVSS

SEQ ID NO: 648 - protein, 11 aa, Artificial Sequence
  Framework sequence
WGQGTQVTVSS

SEQ ID NO: 649 - protein, 11 aa, Artificial Sequence
  Framework sequence
WGQGTQVTVSS

SEQ ID NO: 650 - protein, 11 aa, Artificial Sequence
  Framework sequence
WGQGTQVTVSS

SEQ ID NO: 651 - protein, 11 aa, Artificial Sequence
  Framework sequence
WGQGTQVTVSS

SEQ ID NO: 652 - protein, 11 aa, Artificial Sequence
  Framework sequence
WGQGTQVTVSS

SEQ ID NO: 653 - protein, 11 aa, Artificial Sequence
  Framework sequence
WGQGTQVTVSS

SEQ ID NO: 654 - protein, 11 aa, Artificial Sequence
  Framework sequence
WGQGTQVTVSS

SEQ ID NO: 655 - protein, 11 aa, Artificial Sequence
  Framework sequence
WGQGTQVTVSS

SEQ ID NO: 656 - protein, 11 aa, Artificial Sequence
  Framework sequence
WGQGTQVTVSS

SEQ ID NO: 657 - protein, 11 aa, Artificial Sequence
  Framework sequence
WGQGTQVTVSS

SEQ ID NO: 658 - protein, 11 aa, Artificial Sequence
  Framework sequence
WGQGTQVTVSS

SEQ ID NO: 659 - protein, 11 aa, Artificial Sequence
  Framework sequence
WGQGTQVTVSS

SEQ ID NO: 660 - protein, 11 aa, Artificial Sequence
  Framework sequence
WGQGTQVTVSS

SEQ ID NO: 661 - protein, 11 aa, Artificial Sequence
  Framework sequence
WGQGTQVTVSS

SEQ ID NO: 662 - protein, 11 aa, Artificial Sequence
  Framework sequence
WGQGTQVTVSS

SEQ ID NO: 663 - protein, 11 aa, Artificial Sequence
  Framework sequence
RGQGTQVTVSS

SEQ ID NO: 664 - protein, 11 aa, Artificial Sequence
  Framework sequence
WGQGTQVTVSS

SEQ ID NO: 665 - protein, 11 aa, Artificial Sequence
  Framework sequence
WGQGTQVTVSS

SEQ ID NO: 666 - protein, 11 aa, Artificial Sequence
  Framework sequence
WGQGTQVTVSS

SEQ ID NO: 667 - protein, 11 aa, Artificial Sequence
  Framework sequence
WGQGTKVTVSS

SEQ ID NO: 668 - protein, 11 aa, Artificial Sequence
  Framework sequence
WGQGTQVTVSS

SEQ ID NO: 669 - protein, 11 aa, Artificial Sequence
  Framework sequence
WGQGTQVTVSS

SEQ ID NO: 670 - protein, 11 aa, Artificial Sequence
  Framework sequence
WGQGTQVTVSS

SEQ ID NO: 671 - protein, 11 aa, Artificial Sequence
  Framework sequence
WGQGTQVTVSS

SEQ ID NO: 672 - protein, 11 aa, Artificial Sequence
  Framework sequence
WGQGTQVTVSS

SEQ ID NO: 673 - protein, 11 aa, Artificial Sequence
  Framework sequence
WGQGTQVTVSS

SEQ ID NO: 674 - protein, 11 aa, Artificial Sequence
  Framework sequence
WGQGTQVTVSS

SEQ ID NO: 675 - protein, 11 aa, Artificial Sequence
  Framework sequence
WGQGTQVTVSS

SEQ ID NO: 676 - protein, 11 aa, Artificial Sequence
  Framework sequence
WGQGTQVTVSS

SEQ ID NO: 677 - protein, 11 aa, Artificial Sequence
  Framework sequence
WGQGTQVTVSS

SEQ ID NO: 678 - protein, 11 aa, Artificial Sequence
  Framework sequence
WGQGTQVTVSS

SEQ ID NO: 679 - protein, 11 aa, Artificial Sequence
  Framework sequence
WGQGTQVTVSS

SEQ ID NO: 680 - protein, 11 aa, Artificial Sequence
  Framework sequence
WGQGTQVTVSS

SEQ ID NO: 681 - protein, 11 aa, Artificial Sequence
  Framework sequence
WGQGTQVTVSS

SEQ ID NO: 682 - protein, 11 aa, Artificial Sequence
  Framework sequence
WGQGTQVTVSS

SEQ ID NO: 683 - protein, 11 aa, Artificial Sequence
  Framework sequence
WGQGTQVTVSS

SEQ ID NO: 684 - protein, 11 aa, Artificial Sequence
  Framework sequence
WGQGTQVTVSS

SEQ ID NO: 685 - protein, 11 aa, Artificial Sequence
  Framework sequence
WGQGTQVTVSS

SEQ ID NO: 686 - protein, 11 aa, Artificial Sequence
  Framework sequence
WGQGTQVTVSS

SEQ ID NO: 687 - protein, 259 aa, Artificial Sequence
  Nanobody
EVQLVESGGGLVQAGGSLSLSCATSGRTISDDTMAWFRQAPGKEREFVAIITFNGARTHYSDSVRDRFTISRDNAKNTVYLQMNSLKSEDTAVYYCAASTKYYSSTYNYIHPAFYDIWGQGTQVTVSSGGGGSGGGSEVQLVESGGGLVQAGGSLRLSCTASGRTFTDYDMGWFRQAPGKEREVVAIIDTNGDNTLTVGSVKGRFAISSDNAKNTVYLQMNSLLPEDTAVYTCAAGAWSALRRSVANYWGQGTQVTVSS

SEQ ID NO: 688 - protein, 260 aa, Artificial Sequence
  Nanobody
EVQLVESGGGLVQAGGSLSLSCATSGRTISDDTMAWFRQAPGKEREFVAIITFNGARTHYSDSVRDRFTISRDNAKNTVYLQMNSLKSEDTAVYYCAASTKYYSSTYNYIHPAFYDIWGQGTQVTVSSGGGGSGGGSEVQLVESGGGTVQAGGSLKLSCAASGRTFTNYAMGWFRQAPGKEREFVAAIAYATHFADSVKGRFTISRGNAKNTVYLQMNSLKPEDTAVYYCAADLSLSKMVSKITSDMDYWGKGTLVTVSS

SEQ ID NO: 689 - protein, 257 aa, Artificial Sequence
  Nanobody
EVQLVESGGGLVQAGGSLSLSCATSGRTISDDTMAWFRQAPGKEREFVAIITFNGARTHYSDSVRDRFTISRDNAKNTVYLQMNSLKSEDTAVYYCAASTKYYSSTYNYIHPAFYDIWGQGTQVTVSSGGGGSGGGSEVQLVESGGGLVQPGGSLRLSCAASGSIFSINTMGWYRQVPGKQRELVATVRSGSITNYADSVQDRFTITRDIDENTVYLQMNSLKPEDTAVYYCLTRASVPGRGYQDYWGQGTQVTVSS

SEQ ID NO: 690 - protein, 250 aa, Artificial Sequence
  Nanobody
EVQLVESGGDLVQTGGSLRLSCAASGITVSDRAMGWYRQAPGKQREMVAGVSRGGMTSYADSVKGRLTISRDNAKNSVYLQMNSLNPEDTAVYYCSAYYRYGSSVPQYWGQGTQVTVSSGGGGSGGGSEVQLVESGGGLVQAGGSLRLSCTASGRTFTDYDMGWFRQAPGKEREVVAIIDTNGDNTLTVGSVKGRFAISSDNAKNTVYLQMNSLLPEDTAVYTCAAGAWSALRRSVANYWGQGTQVTVSS

SEQ ID NO: 691 - protein, 251 aa, Artificial Sequence
  Nanobody
EVQLVESGGDLVQTGGSLRLSCAASGITVSDRAMGWYRQAPGKQREMVAGVSRGGMTSYADSVKGRLTISRDNAKNSVYLQMNSLNPEDTAVYYCSAYYRYGSSVPQYWGQGTQVTVSSGGGGSGGGSEVQLVESGGGTVQAGGSLKLSCAASGRTFTNYAMGWFRQAPGKEREFVAAIAYATHFADSVKGRFTISRGNAKNTVYLQMNSLKPEDTAVYYCAADLSLSKMVSKITSDMDYWGKGTLVTVSS

SEQ ID NO: 692 - protein, 248 aa, Artificial Sequence
  Nanobody
EVQLVESGGDLVQTGGSLRLSCAASGITVSDRAMGWYRQAPGKQREMVAGVSRGGMTSYADSVKGRLTISRDNAKNSVYLQMNSLNPEDTAVYYCSAYYRYGSSVPQYWGQGTQVTVSSGGGGSGGGSEVQLVESGGGLVQPGGSLRLSCAASGSIFSINTMGWYRQVPGKQRELVATVRSGSITNYADSVQDRFTITRDIDENTVYLQMNSLKPEDTAVYYCLTRASVPGRGYQDYWGQGTQVTVSS

SEQ ID NO: 693 - protein, 252 aa, Artificial Sequence
  Nanobody
EVQLVESGGGLVQAGGSLRLSCAASGSIFSIKAMGWYRQAPGKQRELVARITSGGSTYYADSVKGRFTISRDNAKNTVYLQMNSLKPEDTAVFYCNAIVTDSDYDLGNDYWGQGTQVTVSSGGGGSGGGSEVQLVESGGGLVQAGGSLRLSCTASGRTFTDYDMGWFRQAPGKEREVVAIIDTNGDNTLTVGSVKGRFAISSDNAKNTVYLQMNSLLPEDTAVYTCAAGAWSALRRSVANYWGQGTQVTVSS

SEQ ID NO: 694 - protein, 253 aa, Artificial Sequence
  Nanobody
EVQLVESGGGLVQAGGSLRLSCAASGSIFSIKAMGWYRQAPGKQRELVARITSGGSTYYADSVKGRFTISRDNAKNTVYLQMNSLKPEDTAVFYCNAIVTDSDYDLGNDYWGQGTQVTVSSGGGGSGGGSEVQLVESGGGTVQAGGSLKLSCAASGRTFTNYAMGWFRQAPGKEREFVAAIAYATHFADSVKGRFTISRGNAKNTVYLQMNSLKPEDTAVYYCAADLSLSKMVSKITSDMDYWGKGTLVTVSS

SEQ ID NO: 695 - protein, 250 aa, Artificial Sequence
  Nanobody
EVQLVESGGGLVQAGGSLRLSCAASGSIFSIKAMGWYRQAPGKQRELVARITSGGSTYYADSVKGRFTISRDNAKNTVYLQMNSLKPEDTAVFYCNAIVTDSDYDLGNDYWGQGTQVTVSSGGGGSGGGSEVQLVESGGGLVQPGGSLRLSCAASGSIFSINTMGWYRQVPGKQRELVATVRSGSITNYADSVQDRFTITRDIDENTVYLQMNSLKPEDTAVYYCLTRASVPGRGYQDYWGQGTQVTVSS

SEQ ID NO: 696 - protein, 257 aa, Artificial Sequence
  Nanobody
EVQLVESGGGLVEAGGSLRLSCAAAGRTLSSYSMAWFRQAPGKEREFVAIIRGNPSRTYHSDSVKGRFTASRDNAKNTVYLQMNRLEPEDTAVYYCAADPPPFASDYSAPQSYDYWGQGTQVTVSSGGGGSGGGSEVQLVESGGGLVQAGGSLRLSCTASGRTFTDYDMGWFRQAPGKEREVVAIIDTNGDNTLTVGSVKGRFAISSDNAKNTVYLQMNSLLPEDTAVYTCAAGAWSALRRSVANYWGQGTQVTVSS

SEQ ID NO: 697 - protein, 258 aa, Artificial Sequence
  Nanobody
EVQLVESGGGLVEAGGSLRLSCAAAGRTLSSYSMAWFRQAPGKEREFVAIIRGNPSRTYHSDSVKGRFTASRDNAKNTVYLQMNRLEPEDTAVYYCAADPPPFASDYSAPQSYDYWGQGTQVTVSSGGGGSGGGSEVQLVESGGGTVQAGGSLKLSCAASGRTFTNYAMGWFRQAPGKEREFVAAIAYATHFADSVKGRFTISRGNAKNTVYLQMNSLKPEDTAVYYCAADLSLSKMVSKITSDMDYWGKGTLVTVSS

SEQ ID NO: 698 - protein, 250 aa, Artificial Sequence
  Nanobody
EVQLVESGGGLVQPGGSLRLSCAASKSIFDINAMYWHRQAPGKQRESVASITSGGMRNYADSVKDRFTISKDNAKNTVYLQMNGLKPDDTAVYYCGLGRYEGGVWRDYWGQGTQVTVSSGGGGSGGGSEVQLVESGGGLVQAGGSLRLSCTASGRTFTDYDMGWFRQAPGKEREVVAIIDTNGDNTLTVGSVKGRFAISSDNAKNTVYLQMNSLLPEDTAVYTCAAGAWSALRRSVANYWGQGTQVTVSS

SEQ ID NO: 699 - protein, 251 aa, Artificial Sequence
  Nanobody
EVQLVESGGGLVQPGGSLRLSCAASKSIFDINAMYWHRQAPGKQRESVASITSGGMRNYADSVKDRFTISKDNAKNTVYLQMNGLKPDDTAVYYCGLGRYEGGVWRDYWGQGTQVTVSSGGGGSGGGSEVQLVESGGGTVQAGGSLKLSCAASGRTFTNYAMGWFRQAPGKEREFVAAIAYATHFADSVKGRFTISRGNAKNTVYLQMNSLKPEDTAVYYCAADLSLSKMVSKITSDMDYWGKGTLVTVSS

SEQ ID NO: 700 - protein, 248 aa, Artificial Sequence
  Nanobody
EVQLVESGGGLVQPGGSLRLSCAASKSIFDINAMYWHRQAPGKQRESVASITSGGMRNYADSVKDRFTISKDNAKNTVYLQMNGLKPDDTAVYYCGLGRYEGGVWRDYWGQGTQVTVSSGGGGSGGGSEVQLVESGGGLVQPGGSLRLSCAASGSIFSINTMGWYRQVPGKQRELVATVRSGSITNYADSVQDRFTITRDIDENTVYLQMNSLKPEDTAVYYCLTRASVPGRGYQDYWGQGTQVTVSS

SEQ ID NO: 701 - protein, 247 aa, Artificial Sequence
  Nanobody
EVQLVESGGGLVQAGGSLNLSCNASGDIGSINAMGWYRQAPGQQREWVAVITDTDSTIYPDSVKGRFAISRDGAKNTVHLRMSSLKPEDTAVYYCNAYQAGWGDYWGQGTQVTVSSGGGGSGGGSEVQLVESGGGLVQAGGSLRLSCTASGRTFTDYDMGWFRQAPGKEREVVAIIDTNGDNTLTVGSVKGRFAISSDNAKNTVYLQMNSLLPEDTAVYTCAAGAWSALRRSVANYWGQGTQVTVSS

SEQ ID NO: 702 - protein, 248 aa, Artificial Sequence
  Nanobody
EVQLVESGGGLVQAGGSLNLSCNASGDIGSINAMGWYRQAPGQQREWVAVITDTDSTIYPDSVKGRFAISRDGAKNTVHLRMSSLKPEDTAVYYCNAYQAGWGDYWGQGTQVTVSSGGGGSGGGSEVQLVESGGGTVQAGGSLKLSCAASGRTFTNYAMGWFRQAPGKEREFVAAIAYATHFADSVKGRFTISRGNAKNTVYLQMNSLKPEDTAVYYCAADLSLSKMVSKITSDMDYWGKGTLVTVSS

SEQ ID NO: 703 - protein, 245 aa, Artificial Sequence
  Nanobody
EVQLVESGGGLVQAGGSLNLSCNASGDIGSINAMGWYRQAPGQQREWVAVITDTDSTIYPDSVKGRFAISRDGAKNTVHLRMSSLKPEDTAVYYCNAYQAGWGDYWGQGTQVTVSSGGGGSGGGSEVQLVESGGGLVQPGGSLRLSCAASGSIFSINTMGWYRQVPGKQRELVATVRSGSITNYADSVQDRFTITRDIDENTVYLQMNSLKPEDTAVYYCLTRASVPGRGYQDYWGQGTQVTVSS

SEQ ID NO: 704 - protein, 249 aa, Artificial Sequence
  Nanobody
EVQLVESGGGLVQAGGSLRLSCAASGGIFSDMFMGWFRQAPGKSRESVARISPSGNTFYQDSVRGRFTISTDNAKNTVYLQMNNLKPEDTAVYYCAANVGVTGSYEYWGQGTQVTVSSGGGGSGGGSEVQLVESGGGLVQAGGSLRLSCTASGRTFTDYDMGWFRQAPGKEREVVAIIDTNGDNTLTVGSVKGRFAISSDNAKNTVYLQMNSLLPEDTAVYTCAAGAWSALRRSVANYWGQGTQVTVSS

SEQ ID NO: 705 - protein, 250 aa, Artificial Sequence
  Nanobody
EVQLVESGGGLVQAGGSLRLSCAASGGIFSDMFMGWFRQAPGKSRESVARISPSGNTFYQDSVRGRFTISTDNAKNTVYLQMNNLKPEDTAVYYCAANVGVTGSYEYWGQGTQVTVSSGGGGSGGGSEVQLVESGGGTVQAGGSLKLSCAASGRTFTNYAMGWFRQAPGKEREFVAAIAYATHFADSVKGRFTISRGNAKNTVYLQMNSLKPEDTAVYYCAADLSLSKMVSKITSDMDYWGKGTLVTVSS

SEQ ID NO: 706 - protein, 247 aa, Artificial Sequence
  Nanobody
EVQLVESGGGLVQAGGSLRLSCAASGGIFSDMFMGWFRQAPGKSRESVARISPSGNTFYQDSVRGRFTISTDNAKNTVYLQMNNLKPEDTAVYYCAANVGVTGSYEYWGQGTQVTVSSGGGGSGGGSEVQLVESGGGLVQPGGSLRLSCAASGSIFSINTMGWYRQVPGKQRELVATVRSGSITNYADSVQDRFTITRDIDENTVYLQMNSLKPEDTAVYYCLTRASVPGRGYQDYWGQGTQVTVSS

SEQ ID NO: 707 - protein, 259 aa, Artificial Sequence; identical to SEQ ID NO: 687
  Nanobody

SEQ ID NO: 708 - protein, 286 aa, Artificial Sequence
  Nanobody
EVQLVESGGGLVQAGGSLSLSCATSGRTISDDTMAWFRQAPGKEREFVAIITFNGARTHYSDSVRDRFTISRDNAKNTVYLQMNSLKSEDTAVYYCAASTKYYSSTYNYIHPAFYDIWGQGTQVTVSSGGGGSGGGGSGGGGSGGGGSGGGGSGGGGSGGGGSEVQLVESGGGTVQAGGSLKLSCAASGRTFTNYAMGWFRQAPGKEREFVAAIAYATHFADSVKGRFTISRGNAKNTVYLQMNSLKPEDTAVYYCAADLSLSKMVSKITSDMDYWGKGTLVTVSS

SEQ ID NO: 709 - protein, 283 aa, Artificial Sequence
  Nanobody
EVQLVESGGGLVQAGGSLSLSCATSGRTISDDTMAWFRQAPGKEREFVAIITFNGARTHYSDSVRDRFTISRDNAKNTVYLQMNSLKSEDTAVYYCAASTKYYSSTYNYIHPAFYDIWGQGTQVTVSSGGGGSGGGGSGGGGSGGGGSGGGGSGGGGSGGGGSEVQLVESGGGLVQPGGSLRLSCAASGSIFSINTMGWYRQVPGKQRELVATVRSGSITNYADSVQDRFTITRDIDENTVYLQMNSLKPEDTAVYYCLTRASVPGRGYQDYWGQGTQVTVSS

SEQ ID NO: 710 - protein, 276 aa, Artificial Sequence
  Nanobody
EVQLVESGGDLVQTGGSLRLSCAASGITVSDRAMGWYRQAPGKQREMVAGVSRGGMTSYADSVKGRLTISRDNAKNSVYLQMNSLNPEDTAVYYCSAYYRYGSSVPQYWGQGTQVTVSSGGGGSGGGGSGGGGSGGGGSGGGGSGGGGSGGGGSEVQLVESGGGLVQAGGSLRLSCTASGRTFTDYDMGWFRQAPGKEREVVAIIDTNGDNTLTVGSVKGRFAISSDNAKNTVYLQMNSLLPEDTAVYTCAAGAWSALRRSVANYWGQGTQVTVSS

SEQ ID NO: 711 - protein, 277 aa, Artificial Sequence
  Nanobody
EVQLVESGGDLVQTGGSLRLSCAASGITVSDRAMGWYRQAPGKQREMVAGVSRGGMTSYADSVKGRLTISRDNAKNSVYLQMNSLNPEDTAVYYCSAYYRYGSSVPQYWGQGTQVTVSSGGGGSGGGGSGGGGSGGGGSGGGGSGGGGSGGGGSEVQLVESGGGTVQAGGSLKLSCAASGRTFTNYAMGWFRQAPGKEREFVAAIAYATHFADSVKGRFTISRGNAKNTVYLQMNSLKPEDTAVYYCAADLSLSKMVSKITSDMDYWGKGTLVTVSS

SEQ ID NO: 712 - protein, 274 aa, Artificial Sequence
  Nanobody
EVQLVESGGDLVQTGGSLRLSCAASGITVSDRAMGWYRQAPGKQREMVAGVSRGGMTSYADSVKGRLTISRDNAKNSVYLQMNSLNPEDTAVYYCSAYYRYGSSVPQYWGQGTQVTVSSGGGGSGGGGSGGGGSGGGGSGGGGSGGGGSGGGGSEVQLVESGGGLVQPGGSLRLSCAASGSIFSINTMGWYRQVPGKQRELVATVRSGSITNYADSVQDRFTITRDIDENTVYLQMNSLKPEDTAVYYCLTRASVPGRGYQDYWGQGTQVTVSS

SEQ ID NO: 713 - protein, 278 aa, Artificial Sequence
  Nanobody
EVQLVESGGGLVQAGGSLRLSCAASGSIFSIKAMGWYRQAPGKQRELVARITSGGSTYYADSVKGRFTISRDNAKNTVYLQMNSLKPEDTAVFYCNAIVTDSDYDLGNDYWGQGTQVTVSSGGGGSGGGGSGGGGSGGGGSGGGGSGGGGSGGGGSEVQLVESGGGLVQAGGSLRLSCTASGRTFTDYDMGWFRQAPGKEREVVAIIDTNGDNTLTVGSVKGRFAISSDNAKNTVYLQMNSLLPEDTAVYTCAAGAWSALRRSVANYWGQGTQVTVSS

SEQ ID NO: 714 - protein, 279 aa, Artificial Sequence
  Nanobody
EVQLVESGGGLVQAGGSLRLSCAASGSIFSIKAMGWYRQAPGKQRELVARITSGGSTYYADSVKGRFTISRDNAKNTVYLQMNSLKPEDTAVFYCNAIVTDSDYDLGNDYWGQGTQVTVSSGGGGSGGGGSGGGGSGGGGSGGGGSGGGGSGGGGSEVQLVESGGGTVQAGGSLKLSCAASGRTFTNYAMGWFRQAPGKEREFVAAIAYATHFADSVKGRFTISRGNAKNTVYLQMNSLKPEDTAVYYCAADLSLSKMVSKITSDMDYWGKGTLVTVSS

SEQ ID NO: 715 - protein, 276 aa, Artificial Sequence
  Nanobody
EVQLVESGGGLVQAGGSLRLSCAASGSIFSIKAMGWYRQAPGKQRELVARITSGGSTYYADSVKGRFTISRDNAKNTVYLQMNSLKPEDTAVFYCNAIVTDSDYDLGNDYWGQGTQVTVSSGGGGSGGGGSGGGGSGGGGSGGGGSGGGGSGGGGSEVQLVESGGGLVQPGGSLRLSCAASGSIFSINTMGWYRQVPGKQRELVATVRSGSITNYADSVQDRFTITRDIDENTVYLQMNSLKPEDTAVYYCLTRASVPGRGYQDYWGQGTQVTVSS

SEQ ID NO: 716 - protein, 283 aa, Artificial Sequence
  Nanobody
EVQLVESGGGLVEAGGSLRLSCAAAGRTLSSYSMAWFRQAPGKEREFVAIIRGNPSRTYHSDSVKGRFTASRDNAKNTVYLQMNRLEPEDTAVYYCAADPPPFASDYSAPQSYDYWGQGTQVTVSSGGGGSGGGGSGGGGSGGGGSGGGGSGGGGSGGGGSEVQLVESGGGLVQAGGSLRLSCTASGRTFTDYDMGWFRQAPGKEREVVAIIDTNGDNTLTVGSVKGRFAISSDNAKNTVYLQMNSLLPEDTAVYTCAAGAWSALRRSVANYWGQGTQVTVSS

SEQ ID NO: 717 - protein, 284 aa, Artificial Sequence
  Nanobody
EVQLVESGGGLVEAGGSLRLSCAAAGRTLSSYSMAWFRQAPGKEREFVAIIRGNPSRTYHSDSVKGRFTASRDNAKNTVYLQMNRLEPEDTAVYYCAADPPPFASDYSAPQSYDYWGQGTQVTVSSGGGGSGGGGSGGGGSGGGGSGGGGSGGGGSGGGGSEVQLVESGGGTVQAGGSLKLSCAASGRTFTNYAMGWFRQAPGKEREFVAAIAYATHFADSVKGRFTISRGNAKNTVYLQMNSLKPEDTAVYYCAADLSLSKMVSKITSDMDYWGKGTLVTVSS

SEQ ID NO: 718 - protein, 276 aa, Artificial Sequence
  Nanobody
EVQLVESGGGLVQPGGSLRLSCAASKSIFDINAMYWHRQAPGKQRESVASITSGGMRNYADSVKDRFTISKDNAKNTVYLQMNGLKPDDTAVYYCGLGRYEGGVWRDYWGQGTQVTVSSGGGGSGGGGSGGGGSGGGGSGGGGSGGGGSGGGGSEVQLVESGGGLVQAGGSLRLSCTASGRTFTDYDMGWFRQAPGKEREVVAIIDTNGDNTLTVGSVKGRFAISSDNAKNTVYLQMNSLLPEDTAVYTCAAGAWSALRRSVANYWGQGTQVTVSS

SEQ ID NO: 719 - protein, 277 aa, Artificial Sequence
  Nanobody
EVQLVESGGGLVQPGGSLRLSCAASKSIFDINAMYWHRQAPGKQRESVASITSGGMRNYADSVKDRFTISKDNAKNTVYLQMNGLKPDDTAVYYCGLGRYEGGVWRDYWGQGTQVTVSSGGGGSGGGGSGGGGSGGGGSGGGGSGGGGSGGGGSEVQLVESGGGTVQAGGSLKLSCAASGRTFTNYAMGWFRQAPGKEREFVAAIAYATHFADSVKGRFTISRGNAKNTVYLQMNSLKPEDTAVYYCAADLSLSKMVSKITSDMDYWGKGTLVTVSS

SEQ ID NO: 720 - protein, 274 aa, Artificial Sequence
  Nanobody
EVQLVESGGGLVQPGGSLRLSCAASKSIFDINAMYWHRQAPGKQRESVASITSGGMRNYADSVKDRFTISKDNAKNTVYLQMNGLKPDDTAVYYCGLGRYEGGVWRDYWGQGTQVTVSSGGGGSGGGGSGGGGSGGGGSGGGGSGGGGSGGGGSEVQLVESGGGLVQPGGSLRLSCAASGSIFSINTMGWYRQVPGKQRELVATVRSGSITNYADSVQDRFTITRDIDENTVYLQMNSLKPEDTAVYYCLTRASVPGRGYQDYWGQGTQVTVSS

SEQ ID NO: 721 - protein, 273 aa, Artificial Sequence
  Nanobody
EVQLVESGGGLVQAGGSLNLSCNASGDIGSINAMGWYRQAPGQQREWVAVITDTDSTIYPDSVKGRFAISRDGAKNTVHLRMSSLKPEDTAVYYCNAYQAGWGDYWGQGTQVTVSSGGGGSGGGGSGGGGSGGGGSGGGGSGGGGSGGGGSEVQLVESGGGLVQAGGSLRLSCTASGRTFTDYDMGWFRQAPGKEREVVAIIDTNGDNTLTVGSVKGRFAISSDNAKNTVYLQMNSLLPEDTAVYTCAAGAWSALRRSVANYWGQGTQVTVSS

SEQ ID NO: 722 - protein, 274 aa, Artificial Sequence
  Nanobody
EVQLVESGGGLVQAGGSLNLSCNASGDIGSINAMGWYRQAPGQQREWVAVITDTDSTIYPDSVKGRFAISRDGAKNTVHLRMSSLKPEDTAVYYCNAYQAGWGDYWGQGTQVTVSSGGGGSGGGGSGGGGSGGGGSGGGGSGGGGSGGGGSEVQLVESGGGTVQAGGSLKLSCAASGRTFTNYAMGWFRQAPGKEREFVAAIAYATHFADSVKGRFTISRGNAKNTVYLQMNSLKPEDTAVYYCAADLSLSKMVSKITSDMDYWGKGTLVTVSS

SEQ ID NO: 723 - protein, 271 aa, Artificial Sequence
  Nanobody
EVQLVESGGGLVQAGGSLNLSCNASGDIGSINAMGWYRQAPGQQREWVAVITDTDSTIYPDSVKGRFAISRDGAKNTVHLRMSSLKPEDTAVYYCNAYQAGWGDYWGQGTQVTVSSGGGGSGGGGSGGGGSGGGGSGGGGSGGGGSGGGGSEVQLVESGGGLVQPGGSLRLSCAASGSIFSINTMGWYRQVPGKQRELVATVRSGSITNYADSVQDRFTITRDIDENTVYLQMNSLKPEDTAVYYCLTRASVPGRGYQDYWGQGTQVTVSS

SEQ ID NO: 724 - protein, 275 aa, Artificial Sequence
  Nanobody
EVQLVESGGGLVQAGGSLRLSCAASGGIFSDMFMGWFRQAPGKSRESVARISPSGNTFYQDSVRGRFTISTDNAKNTVYLQMNNLKPEDTAVYYCAANVGVTGSYEYWGQGTQVTVSSGGGGSGGGGSGGGGSGGGGSGGGGSGGGGSGGGGSEVQLVESGGGLVQAGGSLRLSCTASGRTFTDYDMGWFRQAPGKEREVVAIIDTNGDNTLTVGSVKGRFAISSDNAKNTVYLQMNSLLPEDTAVYTCAAGAWSALRRSVANYWGQGTQVTVSS

SEQ ID NO: 725 - protein, 276 aa, Artificial Sequence
  Nanobody
EVQLVESGGGLVQAGGSLRLSCAASGGIFSDMFMGWFRQAPGKSRESVARISPSGNTFYQDSVRGRFTISTDNAKNTVYLQMNNLKPEDTAVYYCAANVGVTGSYEYWGQGTQVTVSSGGGGSGGGGSGGGGSGGGGSGGGGSGGGGSGGGGSEVQLVESGGGTVQAGGSLKLSCAASGRTFTNYAMGWFRQAPGKEREFVAAIAYATHFADSVKGRFTISRGNAKNTVYLQMNSLKPEDTAVYYCAADLSLSKMVSKITSDMDYWGKGTLVTVSS

SEQ ID NO: 726 - protein, 273 aa, Artificial Sequence
  Nanobody
EVQLVESGGGLVQAGGSLRLSCAASGGIFSDMFMGWFRQAPGKSRESVARISPSGNTFYQDSVRGRFTISTDNAKNTVYLQMNNLKPEDTAVYYCAANVGVTGSYEYWGQGTQVTVSSGGGGSGGGGSGGGGSGGGGSGGGGSGGGGSGGGGSEVQLVESGGGLVQPGGSLRLSCAASGSIFSINTMGWYRQVPGKQRELVATVRSGSITNYADSVQDRFTITRDIDENTVYLQMNSLKPEDTAVYYCLTRASVPGRGYQDYWGQGTQVTVSS

SEQ ID NO: 727 - protein, 260 aa, Artificial Sequence
  Nanobody
EVQLVESGGGLVQAGGSLSLSCATSGRTISDDTMAWFRQAPGKEREFVAIITFNGARTHYSDSVRDRFTISRDNAKNTVYLQMNSLKSEDTAVYYCAASTKYYSSTYNYIHPAFYDIWGQGTQVTVSSGGGGSGGGSEVQLVESGGGLVQAGDSLRLSCLASGRSFKDDAMGWFRQAPGKEREFVSGIDWRGNIVDAESVKGRFTISRENAKNTLYLQMNHLKPEDTAVYYCAASSVFSDLRYRKNPKYWGQGTQVTVSS

SEQ ID NO: 728 - protein, 265 aa, Artificial Sequence
  Nanobody
EVQLVESGGGLVQAGGSLSLSCATSGRTISDDTMAWFRQAPGKEREFVAIITFNGARTHYSDSVRDRFTISRDNAKNTVYLQMNSLKSEDTAVYYCAASTKYYSSTYNYIHPAFYDIWGQGTQVTVSSGGGGSGGGSEVQLVESGGGLVQPGGSLRLSCAASGVTLDYYAIGWFRQAPGKEREGVSSISSNDGSTFYADSVKGRFTISRDKAKNTVYLQMNSLKPEDTAVYYCAATYLTAQAVGVPVAYYEFDYWGQGTQVTVSS

SEQ ID NO: 729 - protein, 258 aa, Artificial Sequence
  Nanobody
EVQLVESGGGLVQAGGSLSLSCATSGRTISDDTMAWFRQAPGKEREFVAIITFNGARTHYSDSVRDRFTISRDNAKNTVYLQMNSLKSEDTAVYYCAASTKYYSSTYNYIHPAFYDIWGQGTQVTVSSGGGGSGGGSKVQLVESGGGLVQPGGSLRLSCAASGFTFSSYAMSWVRRAPGKGLEWVSAINSDGTGSSYAPFVTGRFTASRDNAKNTLYLQMNSLKPEDTAVYYCTNSNRYDYADFSAVRGQGTQVTVSS

SEQ ID NO: 730 - protein, 260 aa, Artificial Sequence
  Nanobody
EVQLVESGGGLVQAGGSLSLSCATSGRTISDDTMAWFRQAPGKEREFVAIITFNGARTHYSDSVRDRFTISRDNAKNTVYLQMNSLKSEDTAVYYCAASTKYYSSTYNYIHPAFYDIWGQGTQVTVSSGGGGSGGGSEVQLVESGGGLVQAGDSLRLSCVASGLPFSTLHMGWFRQAPGKEHESVSAISSDGGSEYYAGSVKGRFTISRDNAKNTVYLQMNSLKPEDTAVYYCAADPRRIGANIKYSDYWGQGTQVTVSS

SEQ ID NO: 731 - protein, 261 aa, Artificial Sequence
  Nanobody
EVQLVESGGGLVQAGGSLSLSCATSGRTISDDTMAWFRQAPGKEREFVAIITFNGARTHYSDSVRDRFTISRDNAKNTVYLQMNSLKSEDTAVYYCAASTKYYSSTYNYIHPAFYDIWGQGTQVTVSSGGGGSGGGSEVQLVESGGGLVQPGGSLRLSCAASGSTFSINMMAWYCQAPGKQRELVASISSGGGINYADSVKGRFTISRDYAENSVDLQMNSLKPEDTAVYYCNARGTYLNGDHYSTNYNSWGQGTQVTVSS

SEQ ID NO: 732 - protein, 251 aa, Artificial Sequence
  Nanobody
EVQLVESGGDLVQTGGSLRLSCAASGITVSDRAMGWYRQAPGKQREMVAGVSRGGMTSYADSVKGRLTISRDNAKNSVYLQMNSLNPEDTAVYYCSAYYRYGSSVPQYWGQGTQVTVSSGGGGSGGGSEVQLVESGGGLVQAGDSLRLSCLASGRSFKDDAMGWFRQAPGKEREFVSGIDWRGNIVDAESVKGRFTISRENAKNTLYLQMNHLKPEDTAVYYCAASSVFSDLRYRKNPKYWGQGTQVTVSS

SEQ ID NO: 733 - protein, 256 aa, Artificial Sequence
  Nanobody
EVQLVESGGDLVQTGGSLRLSCAASGITVSDRAMGWYRQAPGKQREMVAGVSRGGMTSYADSVKGRLTISRDNAKNSVYLQMNSLNPEDTAVYYCSAYYRYGSSVPQYWGQGTQVTVSSGGGGSGGGSEVQLVESGGGLVQPGGSLRLSCAASGVTLDYYAIGWFRQAPGKEREGVSSISSNDGSTFYADSVKGRFTISRDKAKNTVYLQMNSLKPEDTAVYYCAATYLTAQAVGVPVAYYEFDYWGQGTQVTVSS

SEQ ID NO: 734 - protein, 249 aa, Artificial Sequence
  Nanobody
EVQLVESGGDLVQTGGSLRLSCAASGITVSDRAMGWYRQAPGKQREMVAGVSRGGMTSYADSVKGRLTISRDNAKNSVYLQMNSLNPEDTAVYYCSAYYRYGSSVPQYWGQGTQVTVSSGGGGSGGGSKVQLVESGGGLVQPGGSLRLSCAASGFTFSSYAMSWVRRAPGKGLEWVSAINSDGTGSSYAPFVTGRFTASRDNAKNTLYLQMNSLKPEDTAVYYCTNSNRYDYADFSAVRGQGTQVTVSS

SEQ ID NO: 735 - protein, 251 aa, Artificial Sequence
  Nanobody
EVQLVESGGDLVQTGGSLRLSCAASGITVSDRAMGWYRQAPGKQREMVAGVSRGGMTSYADSVKGRLTISRDNAKNSVYLQMNSLNPEDTAVYYCSAYYRYGSSVPQYWGQGTQVTVSSGGGGSGGGSEVQLVESGGGLVQAGDSLRLSCVASGLPFSTLHMGWFRQAPGKEHESVSAISSDGGSEYYAGSVKGRFTISRDNAKNTVYLQMNSLKPEDTAVYYCAADPRRIGANIKYSDYWGQGTQVTVSS

SEQ ID NO: 736 - protein, 252 aa, Artificial Sequence
  Nanobody
EVQLVESGGDLVQTGGSLRLSCAASGITVSDRAMGWYRQAPGKQREMVAGVSRGGMTSYADSVKGRLTISRDNAKNSVYLQMNSLNPEDTAVYYCSAYYRYGSSVPQYWGQGTQVTVSSGGGGSGGGSEVQLVESGGGLVQPGGSLRLSCAASGSTFSINMMAWYCQAPGKQRELVASISSGGGINYADSVKGRFTISRDYAENSVDLQMNSLKPEDTAVYYCNARGTYLNGDHYSTNYNSWGQGTQVTVSS

SEQ ID NO: 737 - protein, 253 aa, Artificial Sequence
  Nanobody
EVQLVESGGGLVQAGGSLRLSCAASGSIFSIKAMGWYRQAPGKQRELVARITSGGSTYYADSVKGRFTISRDNAKNTVYLQMNSLKPEDTAVFYCNAIVTDSDYDLGNDYWGQGTQVTVSSGGGGSGGGSEVQLVESGGGLVQAGDSLRLSCLASGRSFKDDAMGWFRQAPGKEREFVSGIDWRGNIVDAESVKGRFTISRENAKNTLYLQMNHLKPEDTAVYYCAASSVFSDLRYRKNPKYWGQGTQVTVSS

SEQ ID NO: 738 - protein, 258 aa, Artificial Sequence
  Nanobody
EVQLVESGGGLVQAGGSLRLSCAASGSIFSIKAMGWYRQAPGKQRELVARITSGGSTYYADSVKGRFTISRDNAKNTVYLQMNSLKPEDTAVFYCNAIVTDSDYDLGNDYWGQGTQVTVSSGGGGSGGGSEVQLVESGGGLVQPGGSLRLSCAASGVTLDYYAIGWFRQAPGKEREGVSSISSNDGSTFYADSVKGRFTISRDKAKNTVYLQMNSLKPEDTAVYYCAATYLTAQAVGVPVAYYEFDYWGQGTQVTVSS

SEQ ID NO: 739 - protein, 251 aa, Artificial Sequence
  Nanobody
EVQLVESGGGLVQAGGSLRLSCAASGSIFSIKAMGWYRQAPGKQRELVARITSGGSTYYADSVKGRFTISRDNAKNTVYLQMNSLKPEDTAVFYCNAIVTDSDYDLGNDYWGQGTQVTVSSGGGGSGGGSKVQLVESGGGLVQPGGSLRLSCAASGFTFSSYAMSWVRRAPGKGLEWVSAINSDGTGSSYAPFVTGRFTASRDNAKNTLYLQMNSLKPEDTAVYYCTNSNRYDYADFSAVRGQGTQVTVSS

SEQ ID NO: 740 - protein, 253 aa, Artificial Sequence
  Nanobody
EVQLVESGGGLVQAGGSLRLSCAASGSIFSIKAMGWYRQAPGKQRELVARITSGGSTYYADSVKGRFTISRDNAKNTVYLQMNSLKPEDTAVFYCNAIVTDSDYDLGNDYWGQGTQVTVSSGGGGSGGGSEVQLVESGGGLVQAGDSLRLSCVASGLPFSTLHMGWFRQAPGKEHESVSAISSDGGSEYYAGSVKGRFTISRDNAKNTVYLQMNSLKPEDTAVYYCAADPRRIGANIKYSDYWGQGTQVTVSS

SEQ ID NO: 741 - protein, 254 aa, Artificial Sequence
  Nanobody
EVQLVESGGGLVQAGGSLRLSCAASGSIFSIKAMGWYRQAPGKQRELVARITSGGSTYYADSVKGRFTISRDNAKNTVYLQMNSLKPEDTAVFYCNAIVTDSDYDLGNDYWGQGTQVTVSSGGGGSGGGSEVQLVESGGGLVQPGGSLRLSCAASGSTFSINMMAWYCQAPGKQRELVASISSGGGINYADSVKGRFTISRDYAENSVDLQMNSLKPEDTAVYYCNARGTYLNGDHYSTNYNSWGQGTQVTVSS

SEQ ID NO: 742 - protein, 258 aa, Artificial Sequence
  Nanobody
EVQLVESGGGLVEAGGSLRLSCAAAGRTLSSYSMAWFRQAPGKEREFVAIIRGNPSRTYHSDSVKGRFTASRDNAKNTVYLQMNRLEPEDTAVYYCAADPPPFASDYSAPQSYDYWGQGTQVTVSSGGGGSGGGSEVQLVESGGGLVQAGDSLRLSCLASGRSFKDDAMGWFRQAPGKEREFVSGIDWRGNIVDAESVKGRFTISRENAKNTLYLQMNHLKPEDTAVYYCAASSVFSDLRYRKNPKYWGQGTQVTVSS

SEQ ID NO: 743 - protein, 263 aa, Artificial Sequence
  Nanobody
EVQLVESGGGLVEAGGSLRLSCAAAGRTLSSYSMAWFRQAPGKEREFVAIIRGNPSRTYHSDSVKGRFTASRDNAKNTVYLQMNRLEPEDTAVYYCAADPPPFASDYSAPQSYDYWGQGTQVTVSSGGGGSGGGSEVQLVESGGGLVQPGGSLRLSCAASGVTLDYYAIGWFRQAPGKEREGVSSISSNDGSTFYADSVKGRFTISRDKAKNTVYLQMNSLKPEDTAVYYCAATYLTAQAVGVPVAYYEFDYWGQGTQVTVSS

SEQ ID NO: 744 - protein, 256 aa, Artificial Sequence
  Nanobody
EVQLVESGGGLVEAGGSLRLSCAAAGRTLSSYSMAWFRQAPGKEREFVAIIRGNPSRTYHSDSVKGRFTASRDNAKNTVYLQMNRLEPEDTAVYYCAADPPPFASDYSAPQSYDYWGQGTQVTVSSGGGGSGGGSKVQLVESGGGLVQPGGSLRLSCAASGFTFSSYAMSWVRRAPGKGLEWVSAINSDGTGSSYAPFVTGRFTASRDNAKNTLYLQMNSLKPEDTAVYYCTNSNRYDYADFSAVRGQGTQVTVSS

SEQ ID NO: 745 - protein, 258 aa, Artificial Sequence
  Nanobody
EVQLVESGGGLVEAGGSLRLSCAAAGRTLSSYSMAWFRQAPGKEREFVAIIRGNPSRTYHSDSVKGRFTASRDNAKNTVYLQMNRLEPEDTAVYYCAADPPPFASDYSAPQSYDYWGQGTQVTVSSGGGGSGGGSEVQLVESGGGLVQAGDSLRLSCVASGLPFSTLHMGWFRQAPGKEHESVSAISSDGGSEYYAGSVKGRFTISRDNAKNTVYLQMNSLKPEDTAVYYCAADPRRIGANIKYSDYWGQGTQVTVSS

SEQ ID NO: 746 - protein, 259 aa, Artificial Sequence
  Nanobody
EVQLVESGGGLVEAGGSLRLSCAAAGRTLSSYSMAWFRQAPGKEREFVAIIRGNPSRTYHSDSVKGRFTASRDNAKNTVYLQMNRLEPEDTAVYYCAADPPPFASDYSAPQSYDYWGQGTQVTVSSGGGGSGGGSEVQLVESGGGLVQPGGSLRLSCAASGSTFSINMMAWYCQAPGKQRELVASISSGGGINYADSVKGRFTISRDYAENSVDLQMNSLKPEDTAVYYCNARGTYLNGDHYSTNYNSWGQGTQVTVSS

SEQ ID NO: 747 - protein, 251 aa, Artificial Sequence
  Nanobody
EVQLVESGGGLVQPGGSLRLSCAASKSIFDINAMYWHRQAPGKQRESVASITSGGMRNYADSVKDRFTISKDNAKNTVYLQMNGLKPDDTAVYYCGLGRYEGGVWRDYWGQGTQVTVSSGGGGSGGGSEVQLVESGGGLVQAGDSLRLSCLASGRSFKDDAMGWFRQAPGKEREFVSGIDWRGNIVDAESVKGRFTISRENAKNTLYLQMNHLKPEDTAVYYCAASSVFSDLRYRKNPKYWGQGTQVTVSS

SEQ ID NO: 748 - protein, 256 aa, Artificial Sequence
  Nanobody
EVQLVESGGGLVQPGGSLRLSCAASKSIFDINAMYWHRQAPGKQRESVASITSGGMRNYADSVKDRFTISKDNAKNTVYLQMNGLKPDDTAVYYCGLGRYEGGVWRDYWGQGTQVTVSSGGGGSGGGSEVQLVESGGGLVQPGGSLRLSCAASGVTLDYYAIGWFRQAPGKEREGVSSISSNDGSTFYADSVKGRFTISRDKAKNTVYLQMNSLKPEDTAVYYCAATYLTAQAVGVPVAYYEFDYWGQGTQVTVSS

SEQ ID NO: 749 - protein, 249 aa, Artificial Sequence
  Nanobody
EVQLVESGGGLVQPGGSLRLSCAASKSIFDINAMYWHRQAPGKQRESVASITSGGMRNYADSVKDRFTISKDNAKNTVYLQMNGLKPDDTAVYYCGLGRYEGGVWRDYWGQGTQVTVSSGGGGSGGGSKVQLVESGGGLVQPGGSLRLSCAASGFTFSSYAMSWVRRAPGKGLEWVSAINSDGTGSSYAPFVTGRFTASRDNAKNTLYLQMNSLKPEDTAVYYCTNSNRYDYADFSAVRGQGTQVTVSS

SEQ ID NO: 750 - protein, 251 aa, Artificial Sequence
  Nanobody
EVQLVESGGGLVQPGGSLRLSCAASKSIFDINAMYWHRQAPGKQRESVASITSGGMRNYADSVKDRFTISKDNAKNTVYLQMNGLKPDDTAVYYCGLGRYEGGVWRDYWGQGTQVTVSSGGGGSGGGSEVQLVESGGGLVQAGDSLRLSCVASGLPFSTLHMGWFRQAPGKEHESVSAISSDGGSEYYAGSVKGRFTISRDNAKNTVYLQMNSLKPEDTAVYYCAADPRRIGANIKYSDYWGQGTQVTVSS

SEQ ID NO: 751 - protein, 252 aa, Artificial Sequence
  Nanobody
EVQLVESGGGLVQPGGSLRLSCAASKSIFDINAMYWHRQAPGKQRESVASITSGGMRNYADSVKDRFTISKDNAKNTVYLQMNGLKPDDTAVYYCGLGRYEGGVWRDYWGQGTQVTVSSGGGGSGGGSEVQLVESGGGLVQPGGSLRLSCAASGSTFSINMMAWYCQAPGKQRELVASISSGGGINYADSVKGRFTISRDYAENSVDLQMNSLKPEDTAVYYCNARGTYLNGDHYSTNYNSWGQGTQVTVSS

SEQ ID NO: 752 - protein, 248 aa, Artificial Sequence
  Nanobody
EVQLVESGGGLVQAGGSLNLSCNASGDIGSINAMGWYRQAPGQQREWVAVITDTDSTIYPDSVKGRFAISRDGAKNTVHLRMSSLKPEDTAVYYCNAYQAGWGDYWGQGTQVTVSSGGGGSGGGSEVQLVESGGGLVQAGDSLRLSCLASGRSFKDDAMGWFRQAPGKEREFVSGIDWRGNIVDAESVKGRFTISRENAKNTLYLQMNHLKPEDTAVYYCAASSVFSDLRYRKNPKYWGQGTQVTVSS

SEQ ID NO: 753 - protein, 253 aa, Artificial Sequence
  Nanobody
EVQLVESGGGLVQAGGSLNLSCNASGDIGSINAMGWYRQAPGQQREWVAVITDTDSTIYPDSVKGRFAISRDGAKNTVHLRMSSLKPEDTAVYYCNAYQAGWGDYWGQGTQVTVSSGGGGSGGGSEVQLVESGGGLVQPGGSLRLSCAASGVTLDYYAIGWFRQAPGKEREGVSSISSNDGSTFYADSVKGRFTISRDKAKNTVYLQMNSLKPEDTAVYYCAATYLTAQAVGVPVAYYEFDYWGQGTQVTVSS

SEQ ID NO: 754 - protein, 246 aa, Artificial Sequence
  Nanobody
EVQLVESGGGLVQAGGSLNLSCNASGDIGSINAMGWYRQAPGQQREWVAVITDTDSTIYPDSVKGRFAISRDGAKNTVHLRMSSLKPEDTAVYYCNAYQAGWGDYWGQGTQVTVSSGGGGSGGGSKVQLVESGGGLVQPGGSLRLSCAASGFTFSSYAMSWVRRAPGKGLEWVSAINSDGTGSSYAPFVTGRFTASRDNAKNTLYLQMNSLKPEDTAVYYCTNSNRYDYADFSAVRGQGTQVTVSS

SEQ ID NO: 755 - protein, 248 aa, Artificial Sequence
  Nanobody
EVQLVESGGGLVQAGGSLNLSCNASGDIGSINAMGWYRQAPGQQREWVAVITDTDSTIYPDSVKGRFAISRDGAKNTVHLRMSSLKPEDTAVYYCNAYQAGWGDYWGQGTQVTVSSGGGGSGGGSEVQLVESGGGLVQAGDSLRLSCVASGLPFSTLHMGWFRQAPGKEHESVSAISSDGGSEYYAGSVKGRFTISRDNAKNTVYLQMNSLKPEDTAVYYCAADPRRIGANIKYSDYWGQGTQVTVSS

SEQ ID NO: 756 - protein, 249 aa, Artificial Sequence
  Nanobody
EVQLVESGGGLVQAGGSLNLSCNASGDIGSINAMGWYRQAPGQQREWVAVITDTDSTIYPDSVKGRFAISRDGAKNTVHLRMSSLKPEDTAVYYCNAYQAGWGDYWGQGTQVTVSSGGGGSGGGSEVQLVESGGGLVQPGGSLRLSCAASGSTFSINMMAWYCQAPGKQRELVASISSGGGINYADSVKGRFTISRDYAENSVDLQMNSLKPEDTAVYYCNARGTYLNGDHYSTNYNSWGQGTQVTVSS

SEQ ID NO: 757 - protein, 250 aa, Artificial Sequence
  Nanobody
EVQLVESGGGLVQAGGSLRLSCAASGGIFSDMFMGWFRQAPGKSRESVARISPSGNTFYQDSVRGRFTISTDNAKNTVYLQMNNLKPEDTAVYYCAANVGVTGSYEYWGQGTQVTVSSGGGGSGGGSEVQLVESGGGLVQAGDSLRLSCLASGRSFKDDAMGWFRQAPGKEREFVSGIDWRGNIVDAESVKGRFTISRENAKNTLYLQMNHLKPEDTAVYYCAASSVFSDLRYRKNPKYWGQGTQVTVSS

SEQ ID NO: 758 - protein, 255 aa, Artificial Sequence
  Nanobody
EVQLVESGGGLVQAGGSLRLSCAASGGIFSDMFMGWFRQAPGKSRESVARISPSGNTFYQDSVRGRFTISTDNAKNTVYLQMNNLKPEDTAVYYCAANVGVTGSYEYWGQGTQVTVSSGGGGSGGGSEVQLVESGGGLVQPGGSLRLSCAASGVTLDYYAIGWFRQAPGKEREGVSSISSNDGSTFYADSVKGRFTISRDKAKNTVYLQMNSLKPEDTAVYYCAATYLTAQAVGVPVAYYEFDYWGQGTQVTVSS

SEQ ID NO: 759 - protein, 248 aa, Artificial Sequence
  Nanobody
EVQLVESGGGLVQAGGSLRLSCAASGGIFSDMFMGWFRQAPGKSRESVARISPSGNTFYQDSVRGRFTISTDNAKNTVYLQMNNLKPEDTAVYYCAANVGVTGSYEYWGQGTQVTVSSGGGGSGGGSKVQLVESGGGLVQPGGSLRLSCAASGFTFSSYAMSWVRRAPGKGLEWVSAINSDGTGSSYAPFVTGRFTASRDNAKNTLYLQMNSLKPEDTAVYYCTNSNRYDYADFSAVRGQGTQVTVSS

SEQ ID NO: 760 - protein, 250 aa, Artificial Sequence
  Nanobody
EVQLVESGGGLVQAGGSLRLSCAASGGIFSDMFMGWFRQAPGKSRESVARISPSGNTFYQDSVRGRFTISTDNAKNTVYLQMNNLKPEDTAVYYCAANVGVTGSYEYWGQGTQVTVSSGGGGSGGGSEVQLVESGGGLVQAGDSLRLSCVASGLPFSTLHMGWFRQAPGKEHESVSAISSDGGSEYYAGSVKGRFTISRDNAKNTVYLQMNSLKPEDTAVYYCAADPRRIGANIKYSDYWGQGTQVTVSS

SEQ ID NO: 761 - protein, 251 aa, Artificial Sequence
  Nanobody
EVQLVESGGGLVQAGGSLRLSCAASGGIFSDMFMGWFRQAPGKSRESVARISPSGNTFYQDSVRGRFTISTDNAKNTVYLQMNNLKPEDTAVYYCAANVGVTGSYEYWGQGTQVTVSSGGGGSGGGSEVQLVESGGGLVQPGGSLRLSCAASGSTFSINMMAWYCQAPGKQRELVASISSGGGINYADSVKGRFTISRDYAENSVDLQMNSLKPEDTAVYYCNARGTYLNGDHYSTNYNSWGQGTQVTVSS

SEQ ID NO: 762 - protein, 286 aa, Artificial Sequence
  Nanobody
EVQLVESGGGLVQAGGSLSLSCATSGRTISDDTMAWFRQAPGKEREFVAIITFNGARTHYSDSVRDRFTISRDNAKNTVYLQMNSLKSEDTAVYYCAASTKYYSSTYNYIHPAFYDIWGQGTQVTVSSGGGGSGGGGSGGGGSGGGGSGGGGSGGGGSGGGGSEVQLVESGGGLVQAGDSLRLSCLASGRSFKDDAMGWFRQAPGKEREFVSGIDWRGNIVDAESVKGRFTISRENAKNTLYLQMNHLKPEDTAVYYCAASSVFSDLRYRKNPKYWGQGTQVTVSS

SEQ ID NO: 763 - protein, 291 aa, Artificial Sequence
  Nanobody
EVQLVESGGGLVQAGGSLSLSCATSGRTISDDTMAWFRQAPGKEREFVAIITFNGARTHYSDSVRDRFTISRDNAKNTVYLQMNSLKSEDTAVYYCAASTKYYSSTYNYIHPAFYDIWGQGTQVTVSSGGGGSGGGGSGGGGSGGGGSGGGGSGGGGSGGGGSEVQLVESGGGLVQPGGSLRLSCAASGVTLDYYAIGWFRQAPGKEREGVSSISSNDGSTFYADSVKGRFTISRDKAKNTVYLQMNSLKPEDTAVYYCAATYLTAQAVGVPVAYYEFDYWGQGTQVTVSS

SEQ ID NO: 764 - protein, 284 aa, Artificial Sequence
  Nanobody
EVQLVESGGGLVQAGGSLSLSCATSGRTISDDTMAWFRQAPGKEREFVAIITFNGARTHYSDSVRDRFTISRDNAKNTVYLQMNSLKSEDTAVYYCAASTKYYSSTYNYIHPAFYDIWGQGTQVTVSSGGGGSGGGGSGGGGSGGGGSGGGGSGGGGSGGGGSKVQLVESGGGLVQPGGSLRLSCAASGFTFSSYAMSWVRRAPGKGLEWVSAINSDGTGSSYAPFVTGRFTASRDNAKNTLYLQMNSLKPEDTAVYYCTNSNRYDYADFSAVRGQGTQVTVSS

SEQ ID NO: 765 - protein, 286 aa, Artificial Sequence
  Nanobody
EVQLVESGGGLVQAGGSLSLSCATSGRTISDDTMAWFRQAPGKEREFVAIITFNGARTHYSDSVRDRFTISRDNAKNTVYLQMNSLKSEDTAVYYCAASTKYYSSTYNYIHPAFYDIWGQGTQVTVSSGGGGSGGGGSGGGGSGGGGSGGGGSGGGGSGGGGSEVQLVESGGGLVQAGDSLRLSCVASGLPFSTLHMGWFRQAPGKEHESVSAISSDGGSEYYAGSVKGRFTISRDNAKNTVYLQMNSLKPEDTAVYYCAADPRRIGANIKYSDYWGQGTQVTVSS

SEQ ID NO: 766 - protein, 287 aa, Artificial Sequence
  Nanobody
EVQLVESGGGLVQAGGSLSLSCATSGRTISDDTMAWFRQAPGKEREFVAIITFNGARTHYSDSVRDRFTISRDNAKNTVYLQMNSLKSEDTAVYYCAASTKYYSSTYNYIHPAFYDIWGQGTQVTVSSGGGGSGGGGSGGGGSGGGGSGGGGSGGGGSGGGGSEVQLVESGGGLVQPGGSLRLSCAASGSTFSINMMAWYCQAPGKQRELVASISSGGGINYADSVKGRFTISRDYAENSVDLQMNSLKPEDTAVYYCNARGTYLNGDHYSTNYNSWGQGTQVTVSS

SEQ ID NO: 767 - protein, 277 aa, Artificial Sequence
  Nanobody
EVQLVESGGDLVQTGGSLRLSCAASGITVSDRAMGWYRQAPGKQREMVAGVSRGGMTSYADSVKGRLTISRDNAKNSVYLQMNSLNPEDTAVYYCSAYYRYGSSVPQYWGQGTQVTVSSGGGGSGGGGSGGGGSGGGGSGGGGSGGGGSGGGGSEVQLVESGGGLVQAGDSLRLSCLASGRSFKDDAMGWFRQAPGKEREFVSGIDWRGNIVDAESVKGRFTISRENAKNTLYLQMNHLKPEDTAVYYCAASSVFSDLRYRKNPKYWGQGTQVTVSS

SEQ ID NO: 768 - protein, 282 aa, Artificial Sequence
  Nanobody
EVQLVESGGDLVQTGGSLRLSCAASGITVSDRAMGWYRQAPGKQREMVAGVSRGGMTSYADSVKGRLTISRDNAKNSVYLQMNSLNPEDTAVYYCSAYYRYGSSVPQYWGQGTQVTVSSGGGGSGGGGSGGGGSGGGGSGGGGSGGGGSGGGGSEVQLVESGGGLVQPGGSLRLSCAASGVTLDYYAIGWFRQAPGKEREGVSSISSNDGSTFYADSVKGRFTISRDKAKNTVYLQMNSLKPEDTAVYYCAATYLTAQAVGVPVAYYEFDYWGQGTQVTVSS

SEQ ID NO: 769 - protein, 275 aa, Artificial Sequence
  Nanobody
EVQLVESGGDLVQTGGSLRLSCAASGITVSDRAMGWYRQAPGKQREMVAGVSRGGMTSYADSVKGRLTISRDNAKNSVYLQMNSLNPEDTAVYYCSAYYRYGSSVPQYWGQGTQVTVSSGGGGSGGGGSGGGGSGGGGSGGGGSGGGGSGGGGSKVQLVESGGGLVQPGGSLRLSCAASGFTFSSYAMSWVRRAPGKGLEWVSAINSDGTGSSYAPFVTGRFTASRDNAKNTLYLQMNSLKPEDTAVYYCTNSNRYDYADFSAVRGQGTQVTVSS

SEQ ID NO: 770 - protein, 277 aa, Artificial Sequence
  Nanobody
EVQLVESGGDLVQTGGSLRLSCAASGITVSDRAMGWYRQAPGKQREMVAGVSRGGMTSYADSVKGRLTISRDNAKNSVYLQMNSLNPEDTAVYYCSAYYRYGSSVPQYWGQGTQVTVSSGGGGSGGGGSGGGGSGGGGSGGGGSGGGGSGGGGSEVQLVESGGGLVQAGDSLRLSCVASGLPFSTLHMGWFRQAPGKEHESVSAISSDGGSEYYAGSVKGRFTISRDNAKNTVYLQMNSLKPEDTAVYYCAADPRRIGANIKYSDYWGQGTQVTVSS

SEQ ID NO: 771 - protein, 278 aa, Artificial Sequence
  Nanobody
EVQLVESGGDLVQTGGSLRLSCAASGITVSDRAMGWYRQAPGKQREMVAGVSRGGMTSYADSVKGRLTISRDNAKNSVYLQMNSLNPEDTAVYYCSAYYRYGSSVPQYWGQGTQVTVSSGGGGSGGGGSGGGGSGGGGSGGGGSGGGGSGGGGSEVQLVESGGGLVQPGGSLRLSCAASGSTFSINMMAWYCQAPGKQRELVASISSGGGINYADSVKGRFTISRDYAENSVDLQMNSLKPEDTAVYYCNARGTYLNGDHYSTNYNSWGQGTQVTVSS

SEQ ID NO: 772 - protein, 279 aa, Artificial Sequence
  Nanobody
EVQLVESGGGLVQAGGSLRLSCAASGSIFSIKAMGWYRQAPGKQRELVARITSGGSTYYADSVKGRFTISRDNAKNTVYLQMNSLKPEDTAVFYCNAIVTDSDYDLGNDYWGQGTQVTVSSGGGGSGGGGSGGGGSGGGGSGGGGSGGGGSGGGGSEVQLVESGGGLVQAGDSLRLSCLASGRSFKDDAMGWFRQAPGKEREFVSGIDWRGNIVDAESVKGRFTISRENAKNTLYLQMNHLKPEDTAVYYCAASSVFSDLRYRKNPKYWGQGTQVTVSS

SEQ ID NO: 773 - protein, 284 aa, Artificial Sequence
  Nanobody
EVQLVESGGGLVQAGGSLRLSCAASGSIFSIKAMGWYRQAPGKQRELVARITSGGSTYYADSVKGRFTISRDNAKNTVYLQMNSLKPEDTAVFYCNAIVTDSDYDLGNDYWGQGTQVTVSSGGGGSGGGGSGGGGSGGGGSGGGGSGGGGSGGGGSEVQLVESGGGLVQPGGSLRLSCAASGVTLDYYAIGWFRQAPGKEREGVSSISSNDGSTFYADSVKGRFTISRDKAKNTVYLQMNSLKPEDTAVYYCAATYLTAQAVGVPVAYYEFDYWGQGTQVTVSS

SEQ ID NO: 774 - protein, 277 aa, Artificial Sequence
  Nanobody
EVQLVESGGGLVQAGGSLRLSCAASGSIFSIKAMGWYRQAPGKQRELVARITSGGSTYYADSVKGRFTISRDNAKNTVYLQMNSLKPEDTAVFYCNAIVTDSDYDLGNDYWGQGTQVTVSSGGGGSGGGGSGGGGSGGGGSGGGGSGGGGSGGGGSKVQLVESGGGLVQPGGSLRLSCAASGFTFSSYAMSWVRRAPGKGLEWVSAINSDGTGSSYAPFVTGRFTASRDNAKNTLYLQMNSLKPEDTAVYYCTNSNRYDYADFSAVRGQGTQVTVSS

SEQ ID NO: 775 - protein, 279 aa, Artificial Sequence
  Nanobody
EVQLVESGGGLVQAGGSLRLSCAASGSIFSIKAMGWYRQAPGKQRELVARITSGGSTYYADSVKGRFTISRDNAKNTVYLQMNSLKPEDTAVFYCNAIVTDSDYDLGNDYWGQGTQVTVSSGGGGSGGGGSGGGGSGGGGSGGGGSGGGGSGGGGSEVQLVESGGGLVQAGDSLRLSCVASGLPFSTLHMGWFRQAPGKEHESVSAISSDGGSEYYAGSVKGRFTISRDNAKNTVYLQMNSLKPEDTAVYYCAADPRRIGANIKYSDYWGQGTQVTVSS

SEQ ID NO: 776 - protein, 280 aa, Artificial Sequence
  Nanobody
EVQLVESGGGLVQAGGSLRLSCAASGSIFSIKAMGWYRQAPGKQRELVARITSGGSTYYADSVKGRFTISRDNAKNTVYLQMNSLKPEDTAVFYCNAIVTDSDYDLGNDYWGQGTQVTVSSGGGGSGGGGSGGGGSGGGGSGGGGSGGGGSGGGGSEVQLVESGGGLVQPGGSLRLSCAASGSTFSINMMAWYCQAPGKQRELVASISSGGGINYADSVKGRFTISRDYAENSVDLQMNSLKPEDTAVYYCNARGTYLNGDHYSTNYNSWGQGTQVTVSS

SEQ ID NO: 777 - protein, 284 aa, Artificial Sequence
  Nanobody
EVQLVESGGGLVEAGGSLRLSCAAAGRTLSSYSMAWFRQAPGKEREFVAIIRGNPSRTYHSDSVKGRFTASRDNAKNTVYLQMNRLEPEDTAVYYCAADPPPFASDYSAPQSYDYWGQGTQVTVSSGGGGSGGGGSGGGGSGGGGSGGGGSGGGGSGGGGSEVQLVESGGGLVQAGDSLRLSCLASGRSFKDDAMGWFRQAPGKEREFVSGIDWRGNIVDAESVKGRFTISRENAKNTLYLQMNHLKPEDTAVYYCAASSVFSDLRYRKNPKYWGQGTQVTVSS

SEQ ID NO: 778 - protein, 289 aa, Artificial Sequence
  Nanobody
EVQLVESGGGLVEAGGSLRLSCAAAGRTLSSYSMAWFRQAPGKEREFVAIIRGNPSRTYHSDSVKGRFTASRDNAKNTVYLQMNRLEPEDTAVYYCAADPPPFASDYSAPQSYDYWGQGTQVTVSSGGGGSGGGGSGGGGSGGGGSGGGGSGGGGSGGGGSEVQLVESGGGLVQPGGSLRLSCAASGVTLDYYAIGWFRQAPGKEREGVSSISSNDGSTFYADSVKGRFTISRDKAKNTVYLQMNSLKPEDTAVYYCAATYLTAQAVGVPVAYYEFDYWGQGTQVTVSS

SEQ ID NO: 779 - protein, 282 aa, Artificial Sequence
  Nanobody
EVQLVESGGGLVEAGGSLRLSCAAAGRTLSSYSMAWFRQAPGKEREFVAIIRGNPSRTYHSDSVKGRFTASRDNAKNTVYLQMNRLEPEDTAVYYCAADPPPFASDYSAPQSYDYWGQGTQVTVSSGGGGSGGGGSGGGGSGGGGSGGGGSGGGGSGGGGSKVQLVESGGGLVQPGGSLRLSCAASGFTFSSYAMSWVRRAPGKGLEWVSAINSDGTGSSYAPFVTGRFTASRDNAKNTLYLQMNSLKPEDTAVYYCTNSNRYDYADFSAVRGQGTQVTVSS

SEQ ID NO: 780 - protein, 284 aa, Artificial Sequence
  Nanobody
EVQLVESGGGLVEAGGSLRLSCAAAGRTLSSYSMAWFRQAPGKEREFVAIIRGNPSRTYHSDSVKGRFTASRDNAKNTVYLQMNRLEPEDTAVYYCAADPPPFASDYSAPQSYDYWGQGTQVTVSSGGGGSGGGGSGGGGSGGGGSGGGGSGGGGSGGGGSEVQLVESGGGLVQAGDSLRLSCVASGLPFSTLHMGWFRQAPGKEHESVSAISSDGGSEYYAGSVKGRFTISRDNAKNTVYLQMNSLKPEDTAVYYCAADPRRIGANIKYSDYWGQGTQVTVSS

SEQ ID NO: 781 - protein, 285 aa, Artificial Sequence
  Nanobody
EVQLVESGGGLVEAGGSLRLSCAAAGRTLSSYSMAWFRQAPGKEREFVAIIRGNPSRTYHSDSVKGRFTASRDNAKNTVYLQMNRLEPEDTAVYYCAADPPPFASDYSAPQSYDYWGQGTQVTVSSGGGGSGGGGSGGGGSGGGGSGGGGSGGGGSGGGGSEVQLVESGGGLVQPGGSLRLSCAASGSTFSINMMAWYCQAPGKQRELVASISSGGGINYADSVKGRFTISRDYAENSVDLQMNSLKPEDTAVYYCNARGTYLNGDHYSTNYNSWGQGTQVTVSS

SEQ ID NO: 782 - protein, 277 aa, Artificial Sequence
  Nanobody
EVQLVESGGGLVQPGGSLRLSCAASKSIFDINAMYWHRQAPGKQRESVASITSGGMRNYADSVKDRFTISKDNAKNTVYLQMNGLKPDDTAVYYCGLGRYEGGVWRDYWGQGTQVTVSSGGGGSGGGGSGGGGSGGGGSGGGGSGGGGSGGGGSEVQLVESGGGLVQAGDSLRLSCLASGRSFKDDAMGWFRQAPGKEREFVSGIDWRGNIVDAESVKGRFTISRENAKNTLYLQMNHLKPEDTAVYYCAASSVFSDLRYRKNPKYWGQGTQVTVSS

SEQ ID NO: 783 - protein, 282 aa, Artificial Sequence
  Nanobody
EVQLVESGGGLVQPGGSLRLSCAASKSIFDINAMYWHRQAPGKQRESVASITSGGMRNYADSVKDRFTISKDNAKNTVYLQMNGLKPDDTAVYYCGLGRYEGGVWRDYWGQGTQVTVSSGGGGSGGGGSGGGGSGGGGSGGGGSGGGGSGGGGSEVQLVESGGGLVQPGGSLRLSCAASGVTLDYYAIGWFRQAPGKEREGVSSISSNDGSTFYADSVKGRFTISRDKAKNTVYLQMNSLKPEDTAVYYCAATYLTAQAVGVPVAYYEFDYWGQGTQVTVSS

SEQ ID NO: 784 - protein, 275 aa, Artificial Sequence
  Nanobody
EVQLVESGGGLVQPGGSLRLSCAASKSIFDINAMYWHRQAPGKQRESVASITSGGMRNYADSVKDRFTISKDNAKNTVYLQMNGLKPDDTAVYYCGLGRYEGGVWRDYWGQGTQVTVSSGGGGSGGGGSGGGGSGGGGSGGGGSGGGGSGGGGSKVQLVESGGGLVQPGGSLRLSCAASGFTFSSYAMSWVRRAPGKGLEWVSAINSDGTGSSYAPFVTGRFTASRDNAKNTLYLQMNSLKPEDTAVYYCTNSNRYDYADFSAVRGQGTQVTVSS

SEQ ID NO: 785 - protein, 277 aa, Artificial Sequence
  Nanobody
EVQLVESGGGLVQPGGSLRLSCAASKSIFDINAMYWHRQAPGKQRESVASITSGGMRNYADSVKDRFTISKDNAKNTVYLQMNGLKPDDTAVYYCGLGRYEGGVWRDYWGQGTQVTVSSGGGGSGGGGSGGGGSGGGGSGGGGSGGGGSGGGGSEVQLVESGGGLVQAGDSLRLSCVASGLPFSTLHMGWFRQAPGKEHESVSAISSDGGSEYYAGSVKGRFTISRDNAKNTVYLQMNSLKPEDTAVYYCAADPRRIGANIKYSDYWGQGTQVTVSS

SEQ ID NO: 786 - protein, 278 aa, Artificial Sequence
  Nanobody
EVQLVESGGGLVQPGGSLRLSCAASKSIFDINAMYWHRQAPGKQRESVASITSGGMRNYADSVKDRFTISKDNAKNTVYLQMNGLKPDDTAVYYCGLGRYEGGVWRDYWGQGTQVTVSSGGGGSGGGGSGGGGSGGGGSGGGGSGGGGSGGGGSEVQLVESGGGLVQPGGSLRLSCAASGSTFSINMMAWYCQAPGKQRELVASISSGGGINYADSVKGRFTISRDYAENSVDLQMNSLKPEDTAVYYCNARGTYLNGDHYSTNYNSWGQGTQVTVSS

SEQ ID NO: 787 - protein, 274 aa, Artificial Sequence
  Nanobody
EVQLVESGGGLVQAGGSLNLSCNASGDIGSINAMGWYRQAPGQQREWVAVITDTDSTIYPDSVKGRFAISRDGAKNTVHLRMSSLKPEDTAVYYCNAYQAGWGDYWGQGTQVTVSSGGGGSGGGGSGGGGSGGGGSGGGGSGGGGSGGGGSEVQLVESGGGLVQAGDSLRLSCLASGRSFKDDAMGWFRQAPGKEREFVSGIDWRGNIVDAESVKGRFTISRENAKNTLYLQMNHLKPEDTAVYYCAASSVFSDLRYRKNPKYWGQGTQVTVSS

SEQ ID NO: 788 - protein, 279 aa, Artificial Sequence
  Nanobody
EVQLVESGGGLVQAGGSLNLSCNASGDIGSINAMGWYRQAPGQQREWVAVITDTDSTIYPDSVKGRFAISRDGAKNTVHLRMSSLKPEDTAVYYCNAYQAGWGDYWGQGTQVTVSSGGGGSGGGGSGGGGSGGGGSGGGGSGGGGSGGGGSEVQLVESGGGLVQPGGSLRLSCAASGVTLDYYAIGWFRQAPGKEREGVSSISSNDGSTFYADSVKGRFTISRDKAKNTVYLQMNSLKPEDTAVYYCAATYLTAQAVGVPVAYYEFDYWGQGTQVTVSS

SEQ ID NO: 789 - protein, 272 aa, Artificial Sequence
  Nanobody
EVQLVESGGGLVQAGGSLNLSCNASGDIGSINAMGWYRQAPGQQREWVAVITDTDSTIYPDSVKGRFAISRDGAKNTVHLRMSSLKPEDTAVYYCNAYQAGWGDYWGQGTQVTVSSGGGGSGGGGSGGGGSGGGGSGGGGSGGGGSGGGGSKVQLVESGGGLVQPGGSLRLSCAASGFTFSSYAMSWVRRAPGKGLEWVSAINSDGTGSSYAPFVTGRFTASRDNAKNTLYLQMNSLKPEDTAVYYCTNSNRYDYADFSAVRGQGTQVTVSS

SEQ ID NO: 790 - protein, 274 aa, Artificial Sequence
  Nanobody
EVQLVESGGGLVQAGGSLNLSCNASGDIGSINAMGWYRQAPGQQREWVAVITDTDSTIYPDSVKGRFAISRDGAKNTVHLRMSSLKPEDTAVYYCNAYQAGWGDYWGQGTQVTVSSGGGGSGGGGSGGGGSGGGGSGGGGSGGGGSGGGGSEVQLVESGGGLVQAGDSLRLSCVASGLPFSTLHMGWFRQAPGKEHESVSAISSDGGSEYYAGSVKGRFTISRDNAKNTVYLQMNSLKPEDTAVYYCAADPRRIGANIKYSDYWGQGTQVTVSS

SEQ ID NO: 791 - protein, 275 aa, Artificial Sequence
  Nanobody
EVQLVESGGGLVQAGGSLNLSCNASGDIGSINAMGWYRQAPGQQREWVAVITDTDSTIYPDSVKGRFAISRDGAKNTVHLRMSSLKPEDTAVYYCNAYQAGWGDYWGQGTQVTVSSGGGGSGGGGSGGGGSGGGGSGGGGSGGGGSGGGGSEVQLVESGGGLVQPGGSLRLSCAASGSTFSINMMAWYCQAPGKQRELVASISSGGGINYADSVKGRFTISRDYAENSVDLQMNSLKPEDTAVYYCNARGTYLNGDHYSTNYNSWGQGTQVTVSS

SEQ ID NO: 792 - protein, 276 aa, Artificial Sequence
  Nanobody
EVQLVESGGGLVQAGGSLRLSCAASGGIFSDMFMGWFRQAPGKSRESVARISPSGNTFYQDSVRGRFTISTDNAKNTVYLQMNNLKPEDTAVYYCAANVGVTGSYEYWGQGTQVTVSSGGGGSGGGGSGGGGSGGGGSGGGGSGGGGSGGGGSEVQLVESGGGLVQAGDSLRLSCLASGRSFKDDAMGWFRQAPGKEREFVSGIDWRGNIVDAESVKGRFTISRENAKNTLYLQMNHLKPEDTAVYYCAASSVFSDLRYRKNPKYWGQGTQVTVSS

SEQ ID NO: 793 - protein, 281 aa, Artificial Sequence
  Nanobody
EVQLVESGGGLVQAGGSLRLSCAASGGIFSDMFMGWFRQAPGKSRESVARISPSGNTFYQDSVRGRFTISTDNAKNTVYLQMNNLKPEDTAVYYCAANVGVTGSYEYWGQGTQVTVSSGGGGSGGGGSGGGGSGGGGSGGGGSGGGGSGGGGSEVQLVESGGGLVQPGGSLRLSCAASGVTLDYYAIGWFRQAPGKEREGVSSISSNDGSTFYADSVKGRFTISRDKAKNTVYLQMNSLKPEDTAVYYCAATYLTAQAVGVPVAYYEFDYWGQGTQVTVSS

SEQ ID NO: 794 - protein, 274 aa, Artificial Sequence
  Nanobody
EVQLVESGGGLVQAGGSLRLSCAASGGIFSDMFMGWFRQAPGKSRESVARISPSGNTFYQDSVRGRFTISTDNAKNTVYLQMNNLKPEDTAVYYCAANVGVTGSYEYWGQGTQVTVSSGGGGSGGGGSGGGGSGGGGSGGGGSGGGGSGGGGSKVQLVESGGGLVQPGGSLRLSCAASGFTFSSYAMSWVRRAPGKGLEWVSAINSDGTGSSYAPFVTGRFTASRDNAKNTLYLQMNSLKPEDTAVYYCTNSNRYDYADFSAVRGQGTQVTVSS

SEQ ID NO: 795 - protein, 276 aa, Artificial Sequence
  Nanobody
EVQLVESGGGLVQAGGSLRLSCAASGGIFSDMFMGWFRQAPGKSRESVARISPSGNTFYQDSVRGRFTISTDNAKNTVYLQMNNLKPEDTAVYYCAANVGVTGSYEYWGQGTQVTVSSGGGGSGGGGSGGGGSGGGGSGGGGSGGGGSGGGGSEVQLVESGGGLVQAGDSLRLSCVASGLPFSTLHMGWFRQAPGKEHESVSAISSDGGSEYYAGSVKGRFTISRDNAKNTVYLQMNSLKPEDTAVYYCAADPRRIGANIKYSDYWGQGTQVTVSS

SEQ ID NO: 796 - protein, 277 aa, Artificial Sequence
  Nanobody
EVQLVESGGGLVQAGGSLRLSCAASGGIFSDMFMGWFRQAPGKSRESVARISPSGNTFYQDSVRGRFTISTDNAKNTVYLQMNNLKPEDTAVYYCAANVGVTGSYEYWGQGTQVTVSSGGGGSGGGGSGGGGSGGGGSGGGGSGGGGSGGGGSEVQLVESGGGLVQPGGSLRLSCAASGSTFSINMMAWYCQAPGKQRELVASISSGGGINYADSVKGRFTISRDYAENSVDLQMNSLKPEDTAVYYCNARGTYLNGDHYSTNYNSWGQGTQVTVSS

SEQ ID NO: 797 - protein, 256 aa, Artificial Sequence
  Nanobody
EVQLVESGGGLVQAGGSLSLSCATSGRTISDDTMAWFRQAPGKEREFVAIITFNGARTHYSDSVRDRFTISRDNAKNTVYLQMNSLKSEDTAVYYCAASTKYYSSTYNYIHPAFYDIWGQGTQVTVSSGGGGSGGGSEVQLVESGGGLVQAGGSLRLSCAASGRGFSPYTMGWFRQAPGKERVFVAGISWSTGIAHYTDSVKGRFTISRDNAKNTGSLQMNSLKPEDTAVYYCAVVQTTKGNYDYWGQGTQVTVSS

SEQ ID NO: 798 - protein, 256 aa, Artificial Sequence
  Nanobody
EVQLVESGGGLVQAGGSLSLSCATSGRTISDDTMAWFRQAPGKEREFVAIITFNGARTHYSDSVRDRFTISRDNAKNTVYLQMNSLKSEDTAVYYCAASTKYYSSTYNYIHPAFYDIWGQGTQVTVSSGGGGSGGGSEVQLVESGGDLVQTGGSLRLSCAASGITVSDRAMGWYRQAPGKQREMVAGVSRGGMTSYADSVKGRLTISRDNAKNSVYLQMNSLNPEDTAVYYCSAYYRYGSSVPQYWGQGTQVTVSS

SEQ ID NO: 799 - protein, 258 aa, Artificial Sequence
  Nanobody
EVQLVESGGGLVQAGGSLSLSCATSGRTISDDTMAWFRQAPGKEREFVAIITFNGARTHYSDSVRDRFTISRDNAKNTVYLQMNSLKSEDTAVYYCAASTKYYSSTYNYIHPAFYDIWGQGTQVTVSSGGGGSGGGSEVQLVESGGGLVQAGGSLRLSCAASGSIFSIKAMGWYRQAPGKQRELVARITSGGSTYYADSVKGRFTISRDNAKNTVYLQMNSLKPEDTAVFYCNAIVTDSDYDLGNDYWGQGTQVTVSS

SEQ ID NO: 800 - protein, 263 aa, Artificial Sequence
  Nanobody
EVQLVESGGGLVQAGGSLSLSCATSGRTISDDTMAWFRQAPGKEREFVAIITFNGARTHYSDSVRDRFTISRDNAKNTVYLQMNSLKSEDTAVYYCAASTKYYSSTYNYIHPAFYDIWGQGTQVTVSSGGGGSGGGSEVQLVESGGGLVQAGGSLRLSCAASGFAFDDYAIGWFRQAPGKEREGVSSISSSNGNTYYADSVRGRFTISSDNAKNTVYLQMNSLKPEDTGVYYCAAIWGIFFNEKMPVGAYDYWGQGTQVTVSS

SEQ ID NO: 801 - protein, 263 aa, Artificial Sequence
  Nanobody
EVQLVESGGGLVQAGGSLSLSCATSGRTISDDTMAWFRQAPGKEREFVAIITFNGARTHYSDSVRDRFTISRDNAKNTVYLQMNSLKSEDTAVYYCAASTKYYSSTYNYIHPAFYDIWGQGTQVTVSSGGGGSGGGSEVQLVESGGGLVEAGGSLRLSCAAAGRTLSSYSMAWFRQAPGKEREFVAIIRGNPSRTYHSDSVKGRFTASRDNAKNTVYLQMNRLEPEDTAVYYCAADPPPFASDYSAPQSYDYWGQGTQVTVSS

SEQ ID NO: 802 - protein, 247 aa, Artificial Sequence
  Nanobody
EVQLVESGGDLVQTGGSLRLSCAASGITVSDRAMGWYRQAPGKQREMVAGVSRGGMTSYADSVKGRLTISRDNAKNSVYLQMNSLNPEDTAVYYCSAYYRYGSSVPQYWGQGTQVTVSSGGGGSGGGSEVQLVESGGGLVQAGGSLRLSCAASGRGFSPYTMGWFRQAPGKERVFVAGISWSTGIAHYTDSVKGRFTISRDNAKNTGSLQMNSLKPEDTAVYYCAVVQTTKGNYDYWGQGTQVTVSS

SEQ ID NO: 803 - protein, 249 aa, Artificial Sequence
  Nanobody
EVQLVESGGDLVQTGGSLRLSCAASGITVSDRAMGWYRQAPGKQREMVAGVSRGGMTSYADSVKGRLTISRDNAKNSVYLQMNSLNPEDTAVYYCSAYYRYGSSVPQYWGQGTQVTVSSGGGGSGGGSEVQLVESGGGLVQAGGSLRLSCAASGSIFSIKAMGWYRQAPGKQRELVARITSGGSTYYADSVKGRFTISRDNAKNTVYLQMNSLKPEDTAVFYCNAIVTDSDYDLGNDYWGQGTQVTVSS

SEQ ID NO: 804 - protein, 254 aa, Artificial Sequence
  Nanobody
EVQLVESGGDLVQTGGSLRLSCAASGITVSDRAMGWYRQAPGKQREMVAGVSRGGMTSYADSVKGRLTISRDNAKNSVYLQMNSLNPEDTAVYYCSAYYRYGSSVPQYWGQGTQVTVSSGGGGSGGGSEVQLVESGGGLVQAGGSLRLSCAASGFAFDDYAIGWFRQAPGKEREGVSSISSSNGNTYYADSVRGRFTISSDNAKNTVYLQMNSLKPEDTGVYYCAAIWGIFFNEKMPVGAYDYWGQGTQVTVSS

SEQ ID NO: 805 - protein, 254 aa, Artificial Sequence
  Nanobody
EVQLVESGGDLVQTGGSLRLSCAASGITVSDRAMGWYRQAPGKQREMVAGVSRGGMTSYADSVKGRLTISRDNAKNSVYLQMNSLNPEDTAVYYCSAYYRYGSSVPQYWGQGTQVTVSSGGGGSGGGSEVQLVESGGGLVEAGGSLRLSCAAAGRTLSSYSMAWFRQAPGKEREFVAIIRGNPSRTYHSDSVKGRFTASRDNAKNTVYLQMNRLEPEDTAVYYCAADPPPFASDYSAPQSYDYWGQGTQVTVSS

SEQ ID NO: 806 - protein, 249 aa, Artificial Sequence
  Nanobody
EVQLVESGGGLVQAGGSLRLSCAASGSIFSIKAMGWYRQAPGKQRELVARITSGGSTYYADSVKGRFTISRDNAKNTVYLQMNSLKPEDTAVFYCNAIVTDSDYDLGNDYWGQGTQVTVSSGGGGSGGGSEVQLVESGGGLVQAGGSLRLSCAASGRGFSPYTMGWFRQAPGKERVFVAGISWSTGIAHYTDSVKGRFTISRDNAKNTGSLQMNSLKPEDTAVYYCAVVQTTKGNYDYWGQGTQVTVSS

SEQ ID NO: 807 - protein, 256 aa, Artificial Sequence
  Nanobody
EVQLVESGGGLVQAGGSLRLSCAASGSIFSIKAMGWYRQAPGKQRELVARITSGGSTYYADSVKGRFTISRDNAKNTVYLQMNSLKPEDTAVFYCNAIVTDSDYDLGNDYWGQGTQVTVSSGGGGSGGGSEVQLVESGGGLVQAGGSLRLSCAASGFAFDDYAIGWFRQAPGKEREGVSSISSSNGNTYYADSVRGRFTISSDNAKNTVYLQMNSLKPEDTGVYYCAAIWGIFFNEKMPVGAYDYWGQGTQVTVSS

SEQ ID NO: 808 - protein, 256 aa, Artificial Sequence
  Nanobody
EVQLVESGGGLVQAGGSLRLSCAASGSIFSIKAMGWYRQAPGKQRELVARITSGGSTYYADSVKGRFTISRDNAKNTVYLQMNSLKPEDTAVFYCNAIVTDSDYDLGNDYWGQGTQVTVSSGGGGSGGGSEVQLVESGGGLVEAGGSLRLSCAAAGRTLSSYSMAWFRQAPGKEREFVAIIRGNPSRTYHSDSVKGRFTASRDNAKNTVYLQMNRLEPEDTAVYYCAADPPPFASDYSAPQSYDYWGQGTQVTVSS

SEQ ID NO: 809 - protein, 282 aa, Artificial Sequence
  Nanobody
EVQLVESGGGLVQAGGSLSLSCATSGRTISDDTMAWFRQAPGKEREFVAIITFNGARTHYSDSVRDRFTISRDNAKNTVYLQMNSLKSEDTAVYYCAASTKYYSSTYNYIHPAFYDIWGQGTQVTVSSGGGGSGGGGSGGGGSGGGGSGGGGSGGGGSGGGGSEVQLVESGGGLVQAGGSLRLSCAASGRGFSPYTMGWFRQAPGKERVFVAGISWSTGIAHYTDSVKGRFTISRDNAKNTGSLQMNSLKPEDTAVYYCAVVQTTKGNYDYWGQGTQVTVSS

SEQ ID NO: 810 - protein, 282 aa, Artificial Sequence
  Nanobody
EVQLVESGGGLVQAGGSLSLSCATSGRTISDDTMAWFRQAPGKEREFVAIITFNGARTHYSDSVRDRFTISRDNAKNTVYLQMNSLKSEDTAVYYCAASTKYYSSTYNYIHPAFYDIWGQGTQVTVSSGGGGSGGGGSGGGGSGGGGSGGGGSGGGGSGGGGSEVQLVESGGDLVQTGGSLRLSCAASGITVSDRAMGWYRQAPGKQREMVAGVSRGGMTSYADSVKGRLTISRDNAKNSVYLQMNSLNPEDTAVYYCSAYYRYGSSVPQYWGQGTQVTVSS

SEQ ID NO: 811 - protein, 284 aa, Artificial Sequence
  Nanobody
EVQLVESGGGLVQAGGSLSLSCATSGRTISDDTMAWFRQAPGKEREFVAIITFNGARTHYSDSVRDRFTISRDNAKNTVYLQMNSLKSEDTAVYYCAASTKYYSSTYNYIHPAFYDIWGQGTQVTVSSGGGGSGGGGSGGGGSGGGGSGGGGSGGGGSGGGGSEVQLVESGGGLVQAGGSLRLSCAASGSIFSIKAMGWYRQAPGKQRELVARITSGGSTYYADSVKGRFTISRDNAKNTVYLQMNSLKPEDTAVFYCNAIVTDSDYDLGNDYWGQGTQVTVSS

SEQ ID NO: 812 - protein, 289 aa, Artificial Sequence
  Nanobody
EVQLVESGGGLVQAGGSLSLSCATSGRTISDDTMAWFRQAPGKEREFVAIITFNGARTHYSDSVRDRFTISRDNAKNTVYLQMNSLKSEDTAVYYCAASTKYYSSTYNYIHPAFYDIWGQGTQVTVSSGGGGSGGGGSGGGGSGGGGSGGGGSGGGGSGGGGSEVQLVESGGGLVQAGGSLRLSCAASGFAFDDYAIGWFRQAPGKEREGVSSISSSNGNTYYADSVRGRFTISSDNAKNTVYLQMNSLKPEDTGVYYCAAIWGIFFNEKMPVGAYDYWGQGTQVTVSS

SEQ ID NO: 813 - protein, 289 aa, Artificial Sequence
  Nanobody
EVQLVESGGGLVQAGGSLSLSCATSGRTISDDTMAWFRQAPGKEREFVAIITFNGARTHYSDSVRDRFTISRDNAKNTVYLQMNSLKSEDTAVYYCAASTKYYSSTYNYIHPAFYDIWGQGTQVTVSSGGGGSGGGGSGGGGSGGGGSGGGGSGGGGSGGGGSEVQLVESGGGLVEAGGSLRLSCAAAGRTLSSYSMAWFRQAPGKEREFVAIIRGNPSRTYHSDSVKGRFTASRDNAKNTVYLQMNRLEPEDTAVYYCAADPPPFASDYSAPQSYDYWGQGTQVTVSS

SEQ ID NO: 814 - protein, 273 aa, Artificial Sequence
  Nanobody
EVQLVESGGDLVQTGGSLRLSCAASGITVSDRAMGWYRQAPGKQREMVAGVSRGGMTSYADSVKGRLTISRDNAKNSVYLQMNSLNPEDTAVYYCSAYYRYGSSVPQYWGQGTQVTVSSGGGGSGGGGSGGGGSGGGGSGGGGSGGGGSGGGGSEVQLVESGGGLVQAGGSLRLSCAASGRGFSPYTMGWFRQAPGKERVFVAGISWSTGIAHYTDSVKGRFTISRDNAKNTGSLQMNSLKPEDTAVYYCAVVQTTKGNYDYWGQGTQVTVSS

SEQ ID NO: 815 - protein, 275 aa, Artificial Sequence
  Nanobody
EVQLVESGGDLVQTGGSLRLSCAASGITVSDRAMGWYRQAPGKQREMVAGVSRGGMTSYADSVKGRLTISRDNAKNSVYLQMNSLNPEDTAVYYCSAYYRYGSSVPQYWGQGTQVTVSSGGGGSGGGGSGGGGSGGGGSGGGGSGGGGSGGGGSEVQLVESGGGLVQAGGSLRLSCAASGSIFSIKAMGWYRQAPGKQRELVARITSGGSTYYADSVKGRFTISRDNAKNTVYLQMNSLKPEDTAVFYCNAIVTDSDYDLGNDYWGQGTQVTVSS

SEQ ID NO: 816 - protein, 280 aa, Artificial Sequence
  Nanobody
EVQLVESGGDLVQTGGSLRLSCAASGITVSDRAMGWYRQAPGKQREMVAGVSRGGMTSYADSVKGRLTISRDNAKNSVYLQMNSLNPEDTAVYYCSAYYRYGSSVPQYWGQGTQVTVSSGGGGSGGGGSGGGGSGGGGSGGGGSGGGGSGGGGSEVQLVESGGGLVQAGGSLRLSCAASGFAFDDYAIGWFRQAPGKEREGVSSISSSNGNTYYADSVRGRFTISSDNAKNTVYLQMNSLKPEDTGVYYCAAIWGIFFNEKMPVGAYDYWGQGTQVTVSS

SEQ ID NO: 817 - protein, 280 aa, Artificial Sequence
  Nanobody
EVQLVESGGDLVQTGGSLRLSCAASGITVSDRAMGWYRQAPGKQREMVAGVSRGGMTSYADSVKGRLTISRDNAKNSVYLQMNSLNPEDTAVYYCSAYYRYGSSVPQYWGQGTQVTVSSGGGGSGGGGSGGGGSGGGGSGGGGSGGGGSGGGGSEVQLVESGGGLVEAGGSLRLSCAAAGRTLSSYSMAWFRQAPGKEREFVAIIRGNPSRTYHSDSVKGRFTASRDNAKNTVYLQMNRLEPEDTAVYYCAADPPPFASDYSAPQSYDYWGQGTQVTVSS

SEQ ID NO: 818 - protein, 275 aa, Artificial Sequence
  Nanobody
EVQLVESGGGLVQAGGSLRLSCAASGSIFSIKAMGWYRQAPGKQRELVARITSGGSTYYADSVKGRFTISRDNAKNTVYLQMNSLKPEDTAVFYCNAIVTDSDYDLGNDYWGQGTQVTVSSGGGGSGGGGSGGGGSGGGGSGGGGSGGGGSGGGGSEVQLVESGGGLVQAGGSLRLSCAASGRGFSPYTMGWFRQAPGKERVFVAGISWSTGIAHYTDSVKGRFTISRDNAKNTGSLQMNSLKPEDTAVYYCAVVQTTKGNYDYWGQGTQVTVSS

SEQ ID NO: 819 - protein, 282 aa, Artificial Sequence
  Nanobody
EVQLVESGGGLVQAGGSLRLSCAASGSIFSIKAMGWYRQAPGKQRELVARITSGGSTYYADSVKGRFTISRDNAKNTVYLQMNSLKPEDTAVFYCNAIVTDSDYDLGNDYWGQGTQVTVSSGGGGSGGGGSGGGGSGGGGSGGGGSGGGGSGGGGSEVQLVESGGGLVQAGGSLRLSCAASGFAFDDYAIGWFRQAPGKEREGVSSISSSNGNTYYADSVRGRFTISSDNAKNTVYLQMNSLKPEDTGVYYCAAIWGIFFNEKMPVGAYDYWGQGTQVTVSS

SEQ ID NO: 820 - protein, 282 aa, Artificial Sequence
  Nanobody
EVQLVESGGGLVQAGGSLRLSCAASGSIFSIKAMGWYRQAPGKQRELVARITSGGSTYYADSVKGRFTISRDNAKNTVYLQMNSLKPEDTAVFYCNAIVTDSDYDLGNDYWGQGTQVTVSSGGGGSGGGGSGGGGSGGGGSGGGGSGGGGSGGGGSEVQLVESGGGLVEAGGSLRLSCAAAGRTLSSYSMAWFRQAPGKEREFVAIIRGNPSRTYHSDSVKGRFTASRDNAKNTVYLQMNRLEPEDTAVYYCAADPPPFASDYSAPQSYDYWGQGTQVTVSS

SEQ ID NO: 821 - protein, 278 aa, Artificial Sequence
  Nanobody
EVQLVESGGGLVQAGGSLRLSCTASGRTFTDYDMGWFRQAPGKEREVVAIIDTNGDNTLTVGSVKGRFAISSDNAKNTVYLQMNSLLPEDTAVYTCAAGAWSALRRSVANYWGQGTQVTVSSGGGGSGGGGSGGGGSGGGGSGGGGSGGGGSGGGGSEVQLVESGGGLVQAGGSLRLSCAASGSIFSIKAMGWYRQAPGKQRELVARITSGGSTYYADSVKGRFTISRDNAKNTVYLQMNSLKPEDTAVFYCNAIVTDSDYDLGNDYWGQGTQVTVSS

SEQ ID NO: 822 - protein, 284 aa, Artificial Sequence
  Nanobody
EVQLVESGGGLVQPGGSLRLSCAASGVTLDYYAIGWFRQAPGKEREGVSSISSNDGSTFYADSVKGRFTISRDKAKNTVYLQMNSLKPEDTAVYYCAATYLTAQAVGVPVAYYEFDYWGQGTQVTVSSGGGGSGGGGSGGGGSGGGGSGGGGSGGGGSGGGGSEVQLVESGGGLVQAGGSLRLSCAASGSIFSIKAMGWYRQAPGKQRELVARITSGGSTYYADSVKGRFTISRDNAKNTVYLQMNSLKPEDTAVFYCNAIVTDSDYDLGNDYWGQGTQVTVSS

SEQ ID NO: 823 - protein, 115 aa, Artificial Sequence [sequence omitted]

SEQ ID NO: 824 - protein, 115 aa, Artificial Sequence [sequence omitted]

SEQ ID NO: 825 - protein, 117 aa, Artificial Sequence
  Nanobody
AVQLVESGGGLVQGGGSLRLACAASERIFDLNLMGWYRQGPGNERELVATCITVGDSTNYADSVKGRFTISMDYTKQTVYLHMNSLRPEDTGLYYCKIRRTWHSELWGQGTQVTVSS

SEQ ID NO: 826 - protein, 35 aa, Artificial Sequence
  Linker sequence
GGGGSGGGGSGGGGSGGGGSGGGGSGGGGSGGGGS

SEQ ID NO: 827 - protein, 30 aa, Artificial Sequence
  Linker sequence
GGGGSGGGGSGGGGSGGGGSGGGGSGGGGS

SEQ ID NO: 828 - protein, 15 aa, Artificial Sequence
  Linker sequence
GGGGSGGGGSGGGGS

SEQ ID NO: 829 - protein, 9 aa, Artificial Sequence
  Linker sequence
GGGGSGGGS

SEQ ID NO: 830 - protein, 7 aa, Artificial Sequence
  Linker sequence
SGGSGGS

SEQ ID NO: 831 - protein, 12 aa, Artificial Sequence
  Linker sequence
EPKTPKPQPAAA
